(19) United States
(12) Patent Application Publication
(10) Pub. No.: US 2007/0026394 A1
(43) Pub. Date: Feb. 1, 2007

(54) Modulation of gene expression associated with inflammation proliferation and neurite outgrowth using nucleic acid based technologies

(76) Inventors: Lawrence Blatt, Boulder, CO (US); Bharat Chowrira, Louisville, CO (US); Peter Haeberli, Berthoud, CO (US); James McSwiggen, Boulder, CO (US); Kathy Fosnaugh, Boulder, CO (US)

Correspondence Address: MCDONNELL BOEHNEN HULBERT & BERGHOFF LLP, 300 S. WACKER DRIVE, 32ND FLOOR, CHICAGO, IL, 60606, US

(21) Appl. No.: 10/471,271

(22) PCT Filed: Apr. 3, 2002
(86) PCT No.: PCT/US02/10512

§ 371 Date: Oct. 4, 2004

Related U.S. Application Data
(63) Continuation-in-part of application No. 09/827,395, filed on Apr. 5, 2001, now abandoned.
Application No. 09/827,395 is a continuation-in-part of application No. 09/780,533, filed on Feb. 9, 2001, now abandoned.
(60) Provisional application No. 60/181,797, filed on Feb. 11, 2000.
(60) Provisional application No. 60/294,412, filed on May 29, 2001.
(60) Provisional application No. 60/315,315, filed on Aug. 28, 2001.

(51) Int. Cl. C12Q 1/68; C07H 21/02; A61K 48/00

(52) U.S. Cl. 435/6; 435/372; 514/44; 536/23.1

(57) ABSTRACT

The present invention relates to nucleic acid molecules, including antisense, enzymatic nucleic acid molecules, and RNA interference molecules, such as hammerhead ribozymes, DNAzymes, allozymes, siRNA, decoys and antisense, which modulate the expression of prostaglandin D2 (PTGDS), prostaglandin D2 receptor (PTGDR), adenosine receptor, NOGO and NOGO receptor, and IKK genes, such as IKK-gamma, IKK-alpha, or IKK-beta, and PKR genes.

[0001] This patent application claims priority from U.S. Ser. No. 09/827,395, filed Apr. 5, 2001, entitled “METHOD AND REAGENT FOR THE INHIBITION OF NOGO AND NOGO RECEPTOR GENES”, which is a continuation-in-part of Blatt, U.S. Ser. No. 09/780,533 filed Feb. 9, 2001, entitled “METHOD AND REAGENT FOR THE INHIBITION OF NOGO GENE” which claims priority from Blatt, U.S. Ser. No. 60/181,797, filed Feb. 11, 2000, entitled “METHOD AND REAGENT FOR THE INHIBITION OF NOGO GENE”. This patent application also claims priority from U.S. Ser. No. 60/294,412, filed May 29, 2001, entitled “ENZYMATIC NUCLEIC ACID TREATMENT OF DISEASES OR CONDITIONS RELATED TO LEVELS OF IKK-GAMMA AND PKR”, and U.S. Ser. No. 60/315,315, filed Aug. 28, 2001, entitled “METHOD AND REAGENT FOR THE TREATMENT OF ASTHMA AND ALLERGIC CONDITIONS”. These applications are hereby incorporated by reference herein in their entirety including the drawings.

### BACKGROUND OF THE INVENTION

[0002] The present invention provides compounds, compositions, and methods for the study, diagnosis, and treatment of conditions relating to the expression of NOGO and NOGO receptor genes. In particular, the invention provides nucleic acid molecules that are used to modulate the expression of NOGO and NOGO receptor gene products. The present invention further relates to therapeutic compositions and methods for the treatment or diagnosis of diseases or conditions related to IKK gamma (IKKG) and PKR levels, such as cancer, inflammatory, and autoimmune diseases and/or disorders. In addition, the present invention also relates to therapeutic compositions and methods for the treatment or diagnosis of diseases or conditions related to allergic response. Specifically, the invention provides compositions and methods for the treatment of diseases or conditions related to levels of factors involved in allergic conditions such as asthma, for example prostaglandin D2 receptor (PTGDR), prostaglandin D2 synthetase (PTGDS) and adenosine A1 receptor (ADORA1).

[0003] The discussions that follow are not meant to be complete and are provided only to assist understanding the invention that follows. The summary is not an admission that any of the work described below is prior art to the claimed invention.

[0004] The following is a brief description of the current understanding of NOGO and NOGO receptors. The ceased growth of neurons following development has severe implications for lesions of the central nervous system (CNS) caused by neurodegenerative disorders and traumatic accidents. Although CNS neurons have the capacity to rearrange their axonal and dendritic foci in the developed brain, the regeneration of severed CNS axons spanning distance does not exist. Axonal growth following CNS injury is limited by the local tissue environment rather than intrinsic factors, as indicated by transplantation experiments (Richardson et al., 1980, Nature, 284, 264-265). Non-neuronal glial cells of the CNS, including oligodendrocytes and astrocytes, have been shown to inhibit the axonal growth of dorsal root ganglion neurons in culture (Schwab and Thoenen, 1985, J. Neurosci., 5, 2415-2423). Cultured dorsal root ganglion cells can extend their axons across glial cells from the peripheral nervous system, (ie; Schwann cells), but are inhibited by oligodendrocytes and myelin of the CNS (Schwab and Caroni, 1988, J. Neurosci., 8, 2381-2393).

[0005] The non-conducive properties of CNS tissue in adult vertebrates is thought to result from the existence of inhibitory factors rather than the lack of growth factors. The identification of proteins with neurite outgrowth inhibitory or repulsive properties include NI-35, NI-250 (Caroni and Schwab, 1988, Neuron, 1, 85-96), myelin-associated glycoprotein (Genbank Accession No M29273), tenascin-R (Genbank Accession No X98085), and NG-2 (Genbank Accession No X61945). Monoclonal antibodies (mAb IN-1) raised against NI-35/250 have been shown to partially neutralize the growth inhibitory effect of CNS myelin and oligodendrocytes. IN-1 treatment in vivo has resulted in long distance fiber regeneration in lesioned adult mammalian CNS tissue (Weibel et al., 1994, Brain Res., 642, 259-266). Additionally, IN-1 treatment in vivo has resulted in the recovery of specific reflex and locomotor functions after spinal cord injury in adult rats (Bregman et al., 1995, Nature, 378, 498-501).

[0006] Recently, the cloning of NOGO-A (Genbank Accession No AJ242961), the rat complementary DNA encoding NI-220/250 has been reported (Chen et al., 2000, Nature, 403, 434-439). The NOGO gene encodes at least three major protein products (NOGO-A, NOGO-B, and NOGO-C) resulting from both alternative promoter usage and alternative splicing. Recombinant NOGO-A inhibits neurite outgrowth from dorsal root ganglia and the spreading of 3T3 firboblasts. Monoclonal antibody IN-1 recognizes NOGO-A and neutralizes NOGO-A inhibition of neuronal growth in vitro. Evidence supports the proposal that NOGO-A is the previously described rat NI-250 since NOGO-A contains all six peptide sequences obtained from purified bNI-220, the bovine equivalent of rat NI-250 (Chen et al supra).

[0007] Prinjha et al., 2000, Nature, 403, 383-384, report the cloning of the human NOGO gene which encodes three different NOGO isoforms that are potent inhibitors of neurite outgrowth. Using oligonucleotide primers to amplify and clone overlapping regions of the open reading frame of NOGO cDNA, Phrinjha et al., supra identified three forms of cDNA clone corresponding to the three protein isoforms. The longest ORF of 1,192 amino acids corresponds to NOGO-A (Accession No. AJ251383). An intermediate-length splice variant that lacks residues 186-1,004 corresponds to NOGO-B (Accession No. AJ251384). The shortest splice variant, NOGO-C (Accession No. AJ251385), appears to be the previously described rat vp20 (Accession No. AF051335) and foocen-s (Accession No. AF132048), and also lacks residues 186-1,004. According to Prinjha et al., supra, the NOGO amino-terminal region shows no significant homology to any known protein, while the carboxy-terminal tail shares homology with neuroendocrine-specific proteins and other members of the reticulon gene family. In addition, the carboxy-terminal tail contains a consensus sequence that may serve as an endoplasmic-reticulum retention region. Based on the NOGO protein sequence, Prinjha et al., supra, postulate NOGO to be a membrane associated protein comprising a putative large extracellular domain of 1,024 residues with seven predicted N-linked glycosylation sites, two or three transmembrane domains, and a short carboxy-terminal region of 43 residues.

[0008] Grandpre et al., 2000, Nature, also report the identification of NOGO as a potent inhibitor of axon regeneration. The 4.1 kilobase NOGO human cDNA clone identified by Grandpre et al., supra, KIAA0886, is homologous to a cDNA derived from a previous effort to sequence random high molecular-weight brain derived cDNAs (Nagase et al., 1998, DNA Res., 31, 355-364). This cDNA clone encodes a protein that matches all six of the peptide sequences derived from bovine NOGO. Grandpre et al., supra demonstrate that NOGO expression is predominantly associated with the CNS and not the peripheral nervous system (PNS). Cellular localization of NOGO protein appears to be predominantly reticluar in origin, however, NOGO is found on the surface of some oligodentrocytes. An active domain of NOGO has been identified, defined as residues 31-55 of a hydrophilic 66-residue lumenal/extracellular domain. A synthetic fragment corresponding to this sequence exhibits growth-cone collapsing and outgrowth inhibiting activities (Grandpre et al., supra).

[0009] A receptor for the NOGO-A extracellular domain (NOGO-66) is described in Fournier et al., 2001, Nature, 409, 341-346. Fournier et al., have shown that isolated NOGO-66 inhibits axonal extension but does not alter non-neuronal cell morphology. The receptor identified has a high affinity for soluble NOGO-66, and is expressed as a glycophosphatidylinostitol-linked protein on the surface of CNS neurons. Furthermore, the expression of the NOGO-66 receptor in neurons that are NOGO insensitive results in NOGO dependent inhibition of axonal growth in these cells. Cleavage of the NOGO-66 receptor and other glycophosphatidylinostitol-linked proteins from axonal surfaces renders neurons insensitive to NOGO-66 inhibition. As such, disruption of the interaction between NOGO-66 and the NOGO-66 receptor provides the possibility of treating a wide variety of neurological diseases, injuries, and conditions.

[0010] Hauswirth and Flannery, International PCT Publication No. WO 98/48027, describe materials and methods for the specific expression of proteins in retinal photoreceptor cells consisting of an adeno-associated viral vector contacting a rod or cone-opsin promoter. In addition, ribozymes which degrade mutant mRNA are described for use in the treatment of retinitis pigmentosa.

[0011] Fechteler et al., Interanational PCT Publication No. WO 00/03004 describe ribozymes targeting presenilin-2 RNA for the use in treating neurodegenerative diseases such as Alzheimer's disease.

[0012] Eldadah et al., 2000, J. Neurosci., 20, 179-186, describe the protection of cerebellar granule cells from apoptosis induced by serum-potassium deprivation from ribozyme mediated inhibition of caspase-3.

[0013] Seidman et al., 1999, Antisense Nucleic Acid Drug Dev., 9, 333-340, describe in general terms, the use of antisense and ribozyme constructs for treatment of neurodegenerative diseases.

[0014] Denman et al., 1994, Nucleic Acids Research, 22, 2375-82, describe the ribozyme mediated degradation of beta-amyloid peptide precursor mRNA in COS-7 cells.

[0015] Schwab and Chen, International PCT publication No. WO 00/31235, describe NOGO proteins and inhibitors of NOGO.

[0016] Blatt et al., International PCT publication No. WO 01/59103, describe nucleic acid molecules for modulating expression of NOGO genes.

[0017] The following is a brief description of the physiological role of nuclear factor kappa B (NFKB), IKK kinases, and protein kinase PKR. Nuclear factor kappa B (NFKB) is a multiunit transcription factor which regulates the expression of genes involved in a number of physiologic and pathologic processes. NFKB is a key component of the TNF signaling pathway. These processes include, but are not limited to: apoptosis, immune, inflammatory and acute phase responses. The REL-A gene product (a.k.a. RelA or p65), and p50 subunits of NFKB, have been implicated in the induction of inflammatory responses and cellular transformation. NFKB exists in the cytoplasm as an inactive heterodimer of the p50 and p65 subunits. NFKB is complexed with an inhibitory protein complex, IkappaB (IKK complex), until activated by the appropriate stimuli. NFKB activation can occur following stimulation of a variety of cell types by inflammatory mediators, for example TNF and IL-1, and reactive oxygen intermediates. In response to induction, NFKB can stimulate production of pro-inflammatory cytokines such as TNF-alpha, IL-1-beta, IL-6 and iNOS, thereby perpetuating a positive feedback loop. NFKB appears to play a role in a number of disease processes including: ischemia/reperfusion injury (CNS and myocardial), glomerulonephritis, sepsis, allergic airway inflammation, inflammatory bowel disease, infection, arthritis, and cancer.

[0018] The nuclear DNA-binding protein, NFKB, was first identified as a factor that binds and activates the immunoglobulin kappa light chain enhancer in B cells. NFKB now is known to activate transcription of a variety of other cellular genes (e.g., cytokines, adhesion proteins, oncogenes and viral proteins) in response to a variety of stimuli (e.g., phorbol esters, mitogens, cytokines and oxidative stress). In addition, molecular and biochemical characterization of NFKB has shown that the activity is due to a homodimer or heterodimer of a family of DNA binding subunits. Each subunit bears a stretch of 300 amino acids that is homologous to the oncogene, v-rel. The activity first described as NFKB is a heterodimer of p49 or p50 with p65. The p49 and p50 subunits of NFKB (encoded by the NF-kappa B2 or NF kappa B1 genes, respectively) are generated from the precursors NFKB1 (p105) or NFKB2 (p100). The p65 subunit of NFKB (now termed REL-A) is encoded by the rel-A locus.

[0019] The roles of each specific transcription-activating complex now are being elucidated in cells (Perkins, et al., 1992, Proc. Natl. Acad. Sci USA, 89, 1529-1533). For instance, the heterodimer of NFKB1 and Rel A (p50/p65) activates transcription of the promoter for the adhesion molecule, VCAM-1, while NFKB2/RelA heterodimers (p49/p65) actually inhibit transcription (Shu, et al., 1993, Mol. Cell. Biol., 13, 6283-6289). Conversely, heterodimers of NFKB2/RelA (p49/p65) act with Tat-I to activate transcription of the HIV genome, while NFKB1/RelA (p50/p65) heterodimers have little effect (Liu et al., 1992, J. Virol., 66, 3883-3887). Similarly, blocking rel A gene expression with antisense oligonucleotides specifically blocks embryonic stem cell adhesion; blocking NFKB1 gene expression with antisense oligonucleotides had no effect on cellular adhesion (Narayanan et al., 1993, Mol. Cell. Biol., 13, 3802-3810). Thus, the promiscuous role initially assigned to NFKB in transcriptional activation (Lenardo, and Baltimore, 1989, Cell, 58, 227-229) represents the sum of the activities of the rel family of DNA-binding proteins. This conclusion is supported by recent transgenic “knock-out” mice of individual members of the rel family. Such “knock-outs” show few developmental defects, suggesting that essential transcriptional activation functions can be performed by more than one member of the rel family.

[0020] A number of specific inhibitors of NFKB function in cells exist, including treatment with phosphorothioate antisense oliogonucleotide, treatment with double-stranded NFKB binding sites, and over expression of the natural inhibitor MAD-3 (an Ikappa-B family member). These agents have been used to show that NFKB is required for induction of a number of molecules involved in cancer and/or inflammation, as described below.

[0021] NFkB is required for phorbol ester-mediated induction of IL-6 (Kitajima, et al., 1992, Science, 258, 1792-5) and IL-8 (Kunsch and Rosen, 1993, Mol. Cell. Biol., 13, 6137-46).

[0022] NFkB is required for induction of the adhesion molecules ICAM-1 (Eck, et al., 1993, Mol. Cell. Biol., 13, 6530-6536), VCAM-1 (Shu et al., supra), and E-selectin (Read, et al., 1994, J. Exp. Med., 179, 503-512) on endothelial cells.

[0023] NFkB is involved in the induction of the integrin subunit, CD18, and other adhesive properties of leukocytes (Eck et al., 1993 supra).

[0024] HER2/Neu overexpression induces NFKB via a PI3-kinase/Akt pathway involving calpain-mediated degradation of IKB-alpha. Breast cancer has been shown to typify the aberrant expression of NFKB/REL factors (Pianetti et al., 2001, Oncogene, 20, 1287-1299; Sovak et al., 1999, J. Clin. Invest., 100, 2952-2960).

[0025] Inhibition of NFKB activity has been shown to induce apoptosis in murine hepatocytes (Bellas et al., 1997, Am. J. Pathol., 151, 891-896).

[0026] NFKB has been shown to regulate cyclooxygenase-2 expression and cell proliferation in human gastric cancer cells (Joo Weon et al., 2001, Laboratory Investigation, 81, 349-360).

[0027] The above studies suggest that NFKB is integrally involved in the induction of cytokines and adhesion molecules by inflammatory mediators and is involved in the transformation of cancerous cells. Two reported studies point to another connection between NFKB and inflammation: glucocorticoids can exert their anti-inflammatory effects by inhibiting NFKB. The glucocorticoid receptor and p65 both act at NFKB binding sites in the ICAM-1 promoter (van de Stolpe, et al., 1994, J. Biol. Chem., 269, 6185-6192). Glucocorticoid receptor inhibits NFKB-mediated induction of IL-6 (Ray and Prefontaine, 1994 Proc. Natl. Acad. Sci USA, 91, 752-756). Conversely, overexpression of p65 inhibits glucocorticoid induction of the mouse mammary tumor virus promoter. Finally, protein cross-linking and co-immunoprecipitation experiments demonstrated direct physical interaction between p65 and the glucocorticoid receptor.

[0028] The IKK complex that sequesters NFKB in the cytoplasm comprises IkappaB (IκB) proteins (IκB-alpha, IκB-beta, IκKB-epsilon, p105, and p100). The phosphorylation of IκB proteins results in the release of NFKB from the IκB complex which is transported to the nucleus via the unmasking of nuclear translocation signals. Phosphorylation marks IkB proteins for ubiquitination and degradation via the proteosome pathway. Most NFKB inducing stimuli initiate activation of an IκB kinase (IKK) complex that contains two catalytic subunits, IKK-alpha (IKK1) and IKK-beta (IKK2), that phosphorylate IκB-alpha and IκB-beta, with IKK-beta playing a predominant role in pro-inflammatory signaling. In addition to the two kinases, the IKK complex contains regulatory subunits, including IKK-gamma (NEMO/IKKAP1). IKK-gamma is a protein that is critical for the assembly of the IKK complex. IKK-gamma directly binds to IKK-beta and is required for activation of NFKB, for example by TNF-alpha, IL-1-beta, lipopolysaccharide, phorbol 12-myristate 13-acetate, the human T-cell lymphotrophic virus (HTLV-1), or double stranded RNA. Genomic rearrangements in IKK-gamma have been shown to impair NFKB activation and result in incontinentia pigmenti. Additional proteins that associate with the IKK complex include, MEK kinase (MEKK1), NFKB inducing kinase (NIK), receptor interacting protein (RIP), protein kinase CK2, and IKK-associated protein (IKAP), which appears to be associated with the IκB Kinase (IKK) complex, but does not appear to be an integral component of the tripartate IKK complex as does IKK-gamma (Krappmann et al., 2001, J. Biol. Chem., 275, 29779-87).

[0029] The RNA-dependent protein kinase PKR is a signal transducer for NFKB and IFN regulatory factor-1. PKR is required for activation of NFKB by IFN-gamma via a STAT-1 independent pathway (Amitabha et al., 2001, J. Immunol., 166, 6170-6180). The induction of NFKB by PKR takes place though phosphorylation of IκB-alpha, and appears not to require the catalytic activity of PKR, thereby proceeding independently of the dsRNA-binding properties of PKR (Ishii et al., 2001, Oncogene, 20, 1900-1912). PKR also plays an important role in the regulation of protein synthesis by modulating the activity of eukaryotic initiation factor 2 (eIF-2-alpha) through interferon induction.

[0030] Kamiya, JP 2000253884, describes specific antisense oligonucleotides for inhibiting IκB-kinase subunit expression. Krappmann et al., 2001, J. Biol. Chem., describe specific antisense oligonucleotides to IKK-gamma.

[0031] The following is a description of molecular targets involved in diseases or conditions related to allergic response. Asthma is a chronic inflammatory disorder of the lungs characterized by airflow obstruction, bronchial hyper-responsiveness, and airway inflammation. T-lymphocytes that produce TH2 cytokines and eosinophilic leukocytes infiltrate the airways. In the airway and in bronchial alveolar lavage (BAL) fluid of individuals with asthma, high concentrations of TH2 cytokines, interleukin-4 (14), IL-5, and IL-13, are present along with increased levels of adenosine. In contrast to normal individuals, asthmatics respond to adenosine challenge with marked airway obstruction. Upon allergen challenge, mast cells are activated by cross-linked IgE-allergen complexes. Large amounts of prostaglandin D2 (PGD2), the major cyclooxygenase product of arachidonic acid are released. PGD2 is generated from PGH2 via the activity of prostaglandin D2 synthetase (PTGDS). PGD2 receptors and adenosine A1 receptors are present in the lungs and airway along with various other tissues in response to allergic stimuli (Howarth, 1997, Allergy, 52, 12).

[0032] The significance of PGD2 as a mediator of allergic asthma has been established with the development of mice deficient in the PGD2 receptor (DP). DP is a heterotrimeric GTP-binding protein-coupled, rhodopsin-type receptor specific for PGD2 (Hirata et al., 1994, PNAS USA., 91, 11192). These mice fail to develop airway hyperreactivity and have greatly reduced eosinophil infiltration and cytokine accumulation in response to allergens. Upon allergen challenge mice deficient in the prostaglandin D2 (PGD2) receptor (DP) did not develop airway hyperactivity. Cytokine, lymphocyte and eosinophil accumulation in the lungs were greatly reduced (Matsuoka et al., 2000, Science, 287, 2013). The DP −/− mice exhibited no behavioral, anatomic, or histological abnormalities. Primary immune response is not affected by DP disruption.

[0033] Asthma affects more than 100 million people worldwide and more than 17 million Americans (5% of the population). Since 1980 the incidence has more than doubled and deaths have tripled (5,000 deaths in 1995). Annual asthma-related healthcare costs in the US alone were estimated to exceed $14.5 billion in 2000. Current therapies such as inhalant anti-inflammatories and bronchodilators can be used to treat symptoms, however, these therapies do not prevent or cure asthma.

[0034] Sandberg et al., 2001, Prog. Respir. Res., 31, 370-373, describes ribozyme therapy for asthma and COPD.

[0035] Sullivan et al., International U.S. Pat. No. 5,616,488, describes ribozymes targeting interleukin-5 for treatment and diagnosis of asthma and other inflammatory disorders.

[0036] Stinchcomb et al., International PCT Publication No. WO 95/23225, describes ribozymes and methods for inhibiting the expression of disease related genes including genes associated with asthma.

[0037] Nyce, International PCT Publication Nos. WO 00/62736, WO 00/09525, WO 99/13886, WO 98/23294, WO 96/40266 and U.S. Pat. No. 6,025,339 describe specific antisense oligonucleotides targeting certain mRNAs encoding particular adenosine receptors.

### SUMMARY OF THE INVENTION

[0038] The invention features novel nucleic acid-based molecules, for example, enzymatic nucleic acid molecules, allozymes, antisense nucleic acids, 2-5A antisense chimeras, triplex forming oligonucleotides, decoy RNA, dsRNA, siRNA, aptamers, and antisense nucleic acids containing RNA cleaving chemical groups, and methods to modulate gene expression; for example, gene(s) encoding prostaglandin D2 receptor (PTGDR), prostaglandin D2 synthetase (PTGDS), and adenosine receptors (AR) such as adenosine receptor A1 (ADORA1), A2a, A2b, and A3; gene(s) encoding NOGO-A, NOGO-B, NOGO-C, NI-35, NI-220, NI-250, myelin-associated glycoprotein, tenascin-R, NG-2 and/or their corresponding receptors; and genes encoding an IkappaB kinase (IKK) subunit or protein kinase PKR.

[0039] In one embodiment, the instant invention features nucleic-acid based techniques to inhibit the expression of NOGO-A (Accession No. AJ251383), NOGO-B (Accession No. AJ251384), and/or NOGO-C (Accession No. AJ251385), NOGO-66 receptor (Accession No AF283463, Fournier et al., 2001, Nature, 409, 341-346), NI-35, NI-220, and/or NI-250, myelin-associated glycoprotein (Genbank Accession No M29273), tenascin-R (Genbank Accession No X98085), and NG-2 (Genbank Accession No X61945). The description below of the various aspects and embodiments is provided with reference to the exemplary NOGO-A and NOGO-66 receptor genes. However, the various aspects and embodiments are also directed to other genes which express NOGOA-like inhibitor proteins and other receptors involved in neurite outgrowth inhibition. Those additional genes can be analyzed for target sites using the methods described for NOGO and the NOGO-66 receptor, referred to alternatively as NOGO receptor. Thus, the inhibition and the effects of such inhibition of the other genes can be performed as described herein.

[0040] The invention features one or more enzymatic nucleic acid-based molecules and methods that independently or in combination modulate the expression of gene(s) encoding a member of the IκB kinase IKK complex or PKR. In particular embodiments, the invention features nucleic acid-based molecules and methods that modulate the expression of a member of the IκB kinase IKK complex, for example IKK-alpha (IKK1), IKK-beta (IKK2), or IKK-gamma (IKKγ) and/or a protein kinase PKR protein, such as IKK-alpha (IKK1) gene (Genbank Accession No. NM_{—}001278); IKK-beta (IKK2) gene, for example (Genbank Accession No. AF080158), IKK-gamma (IKKγ) gene, for example (Genbank Accession No. NM_{—}003639), and protein kinase PKR gene, for example (Genbank Accession No. NM_{—}002759). The description below of the various aspects and embodiments is provided with reference to the exemplary IKK-gamma and PKR genes. IKK-gamma is also known as NEMO/IKKAP1. However, the various aspects and embodiments are also directed to other genes which encode other subunits of the IKK complex, such as IKK-alpha (IKK1) or IKK-beta (IKK2). Those additional genes can be analyzed for target sites using the methods described for IKK-gamma or PKR. Thus, the inhibition and the effects of such inhibition of the other genes can be performed as described herein.

[0041] In one embodiment, an enzymatic nucleic acid molecule of the invention is in a hammerhead, Inozyme, Zinzyme, DNAzyme, Amberzyme, or G-cleaver configuration.

[0042] In another embodiment, a nucleic acid molecule of the invention comprises between 8 and 100 bases complementary to the RNA of the target gene. In another embodiment, a nucleic acid molecule of the invention comprises between 14 and 24 bases complementary to a RNA molecule of the target gene.

[0043] In one embodiment, an enzymatic nucleic acid molecule, antisense nucleic acid molecule, 2-5A antisense chimera, triplex forming oligonucleotide, decoy RNA, dsRNA, siRNA, aptamer, or antisense nucleic acids containing RNA cleaving chemical groups of the invention is chemically synthesized.

[0044] In another embodiment, an enzymatic nucleic acid molecule, antisense nucleic acid molecule, 2-5A antisense chimera, triplex forming oligonucleotide, decoy RNA, dsRNA, siRNA, aptamer, or antisense nucleic acids containing RNA cleaving chemical groups of the invention comprises at least one 2′-sugar modification.

[0045] In another embodiment, an enzymatic nucleic acid molecule, antisense nucleic acid molecule, 2-5A antisense chimera, triplex forming oligonucleotide, decoy RNA, dsRNA, siRNA, aptamer, or antisense nucleic acids containing RNA cleaving chemical groups of the invention comprises at least one nucleic acid base modification.

[0046] In another embodiment, an enzymatic nucleic acid molecule, antisense nucleic acid molecule, 2-5A antisense chimera, triplex forming oligonucleotide, decoy RNA, dsRNA, siRNA, aptamer, or antisense nucleic acids containing RNA cleaving chemical groups of the invention comprises at least one phosphate backbone modification.

[0047] In one embodiment, the invention features a mammalian cell, for example a human cell, including the nucleic acid molecule of the invention.

[0048] In another embodiment, the invention features a method of reducing target gene expression or activity in a cell, comprising contacting the cell with a nucleic acid molecule of the invention, such as an enzymatic nucleic acid molecule, antisense nucleic acid molecule, 2-5A antisense chimera, triplex forming oligonucleotide, decoy RNA, dsRNA, siRNA, aptamer, or antisense nucleic acids containing RNA cleaving chemical groups, under conditions suitable for the reduction.

[0049] In yet another embodiment, the invention features a method of treatment of a patient having a condition associated with the level of a target gene, such prostaglandin D2 receptor (PTGDR), prostaglandin D2 synthetase (PTGDS), adenosine receptors (AR) such as adenosine receptor A1 (ADORA1), A2a, A2b, and A3, NOGO-A, NOGO-B, NOGO-C, NI-35, NI-220, NI-250, myelin-associated glycoprotein, tenascin-R, NG-2 and/or their corresponding receptors, an IkappaB kinase (IKK) subunit and/or protein kinase PKR, comprising contacting cells of the patient with an enzymatic nucleic acid molecule of the invention, under conditions suitable for the treatment.

[0050] In another embodiment, a method of treatment of a patient having a condition associated with the level of a target gene, such prostaglandin D2 receptor (PTGDR), prostaglandin D2 synthetase (PTGDS), adenosine receptors (AR) such as adenosine receptor A1 (ADORA1), A2a, A2b, and A3, NOGO-A, NOGO-B, NOGO-C, NI-35, NI-220, NI-250, myelin-associated glycoprotein, tenascin-R, NG-2 and/or their corresponding receptors, an IkappaB kinase (IKK) subunit and/or protein kinase PKR is featured, wherein the method further comprises the use of one or more drug therapies under conditions suitable for the treatment.

[0051] In another embodiment, the invention features a method of cleaving a RNA molecule of a target gene, such prostaglandin D2 receptor (PTGDR), prostaglandin D2 synthetase (PTGDS), adenosine receptors (AR) such as adenosine receptor A1 (ADORA1), A2a, A2b, and A3, NOGO-A, NOGO-B, NOGO-C, NI-35, NI-220, NI-250, myelin-associated glycoprotein, tenascin-R, NG-2 and/or their corresponding receptors, an IkappaB kinase (IKK) subunit and/or protein kinase PKR gene, comprising contacting an enzymatic nucleic acid molecule of the invention with a RNA molecule of the corresponding gene under conditions suitable for the cleavage, for example, wherein the cleavage is carried out in the presence of a divalent cation, such as Mg²⁺.

[0052] In one embodiment, a nucleic acid molecule of the invention comprises a cap structure, for example a 3′,3′-linked or 5′,5′-linked deoxyabasic ribose derivative, wherein the cap structure is at the 5′-end, or 3′-end, or both the 5′-end and the 3′-end of the enzymatic nucleic acid molecule.

[0053] In one embodiment, the invention features an expression vector comprising a nucleic acid sequence encoding at least one nucleic acid molecule of the invention, in a manner which allows expression of the nucleic acid molecule.

[0054] In another embodiment, the invention features a mammalian cell, for example, a human cell, including an expression vector of the invention.

[0055] In yet another embodiment, the expression vector of the invention further comprises a sequence for an antisense nucleic acid molecule complementary to a RNA molecule of a target gene, such prostaglandin D2 receptor (PTGDR), prostaglandin D2 synthetase (PTGDS), adenosine receptors (AR) such as adenosine receptor A1 (ADORA1), A2a, A2b, and A3, NOGO-A, NOGO-B, NOGO-C, NI-35, NI-220, NI-250, myelin-associated glycoprotein, tenascin-R, NG-2 and/or their corresponding receptors, an IkappaB kinase (IKK) subunit and/or protein kinase PKR gene.

[0056] In one embodiment, an expression vector of the invention comprises a nucleic acid sequence encoding two or more nucleic acid molecules, such as enzymatic nucleic acid molecules, antisense, aptamers, decoys, siRNA, or 2-5A chimeras which can be the same or different.

[0057] In one embodiment, the method of treatment features an enzymatic nucleic acid molecule of the invention comprises at least five ribose residues, at least ten 2′-O-methyl modifications, and a 3′-end modification, such as a 3′-3′ inverted abasic moiety. In another embodiment, an enzymatic nucleic acid molecule or antisense nucleic acid molecule of the invention further comprises phosphorothioate linkages on at least three of the 5′ terminal nucleotides.

[0058] In another embodiment, the invention features a method of administering to a mammal, for example a human, an enzymatic nucleic acid molecule, antisense nucleic acid molecule, 2-5A antisense chimera, triplex forming oligonucleotide, decoy RNA, dsRNA, siRNA, aptamer, or antisense nucleic acid containing RNA cleaving chemical groups of the invention, comprising contacting the mammal with the nucleic acid molecule under conditions suitable for the administration, for example, in the presence of a delivery reagent such as a lipid, cationic lipid, phospholipid, or liposome.

[0059] In yet another embodiment, the invention features a method of administering to a mammal an enzymatic nucleic acid molecule, antisense nucleic acid molecule, 2-5A antisense chimera, triplex forming oligonucleotide, decoy RNA, dsRNA, siRNA, aptamer, or antisense nucleic acid containing RNA cleaving chemical groups of the invention in conjunction with a therapeutic agent, comprising contacting the mammal, for example a human, with the nucleic acid molecule and the therapeutic agent under conditions suitable for the administration.

[0060] In one embodiment, the invention features the use of an enzymatic nucleic acid molecule, which can be in a hammerhead, NCH, G-cleaver, Amberzyme, Zinzyme, and/or DNAzyme motif, to down-regulate the expression of a a target gene, such as prostaglandin D2 receptor (PTGDR), prostaglandin D2 synthetase (PTGDS), adenosine receptors (AR) such as adenosine receptor A1 (ADORA1), A2a, A2b, and A3, NOGO-A, NOGO-B, NOGO-C, NI-35, NI-220, NI-250, myelin-associated glycoprotein, tenascin-R, NG-2 and/or their corresponding receptors, an IkappaB kinase (IKK) subunit and/or protein kinase PKR gene.

[0061] By “inhibit”, “down-regulate”, or “reduce”, it is meant that the expression of the gene, or level of RNA molecules or equivalent RNA molecules encoding one or more proteins or protein subunits, or activity of one or more proteins or protein subunits, such as prostaglandin D2 receptor (PTGDR), prostaglandin D2 synthetase (PTGDS), adenosine receptors (AR) such as adenosine receptor A1 (ADORA1), A2a, A2b, and A3, NOGO-A, NOGO-B, NOGO-C, NI-35, NI-220, NI-250, myelin-associated glycoprotein, tenascin-R, NG-2 and/or their corresponding receptors, an IkappaB kinase (IKK) subunit and/or protein kinase PKR subunits, is reduced below that observed in the absence of the nucleic acid molecules of the invention. In one embodiment, inhibition, down-regulation or reduction with an enzymatic nucleic acid molecule is below that level observed in the presence of an enzymatically inactive or attenuated molecule that is able to bind to the same site on the target RNA molecule, but is unable to cleave that RNA molecule. In another embodiment, inhibition, down-regulation, or reduction with antisense oligonucleotides is below that level observed in the presence of, for example, an oligonucleotide with scrambled sequence or with mismatches. In another embodiment, inhibition, down-regulation, or reduction of the target gene with a nucleic acid molecule of the instant invention is greater in the presence of the nucleic acid molecule than in its absence.

[0062] By “up-regulate” is meant that the expression of a gene, or level of RNA molecules or equivalent RNA molecules encoding one or more proteins, protein subunits, or activity of one or more proteins or protein subunits, such as a target gene, such as prostaglandin D2 receptor (PTGDR), prostaglandin D2 synthetase (PTGDS), adenosine receptors (AR) such as adenosine receptor A1 (ADORA1), A2a, A2b, and A3, NOGO-A, NOGO-B, NOGO-C, NI-35, NI-220, NI-250, myelin-associated glycoprotein, tenascin-R, NG-2 and/or their corresponding receptors, an IkappaB kinase (IKK) subunit and/or protein kinase PKR subunits, is greater than that observed in the absence of the nucleic acid molecules of the invention. For example, the expression of a gene, such as prostaglandin D2 receptor (PTGDR), prostaglandin D2 synthetase (PTGDS), adenosine receptors (AR) such as adenosine receptor A1 (ADORA1), A2a, A2b, and A3, NOGO-A, NOGO-B, NOGO-C, NI-35, NI-220, NI-250, myelin-associated glycoprotein, tenascin-R, NG-2 and/or their corresponding receptors, an IkappaB kinase (IKK) subunit and/or protein kinase PKR gene, can be increased in order to treat, prevent, ameliorate, or modulate a pathological condition caused or exacerbated by an absence or low level of gene expression.

[0063] By “modulate” is meant that the expression of the gene, or level of RNA molecules or equivalent RNA molecules encoding one or more protein subunits, or activity of one or more protein subunits is up-regulated or down-regulated, such that the expression, level, or activity is greater than or less than that observed in the absence of a nucleic acid molecule of the invention.

[0064] By “enzymatic nucleic acid molecule” it is meant a nucleic acid molecule that has complementarity in a substrate binding region to a specified gene target, and also has an enzymatic activity that is active to specifically cleave target a RNA molecule. That is, the enzymatic nucleic acid molecule is able to intermolecularly cleave a RNA molecule and thereby inactivate a target RNA molecule. These complementary regions allow sufficient hybridization of an enzymatic nucleic acid molecule to a target RNA molecule and thus permit cleavage. One hundred percent complementarity is preferred, but complementarity as low as 50-75% can also be useful in this invention (see for example Werner and Uhlenbeck, 1995, Nucleic Acids Research, 23, 2092-2096; Hammann et al., 1999, Antisense and Nucleic Acid Drug Dev., 9, 25-31). The nucleic acids can be modified at the base, sugar, and/or phosphate groups. The term enzymatic nucleic acid is used interchangeably with phrases such as ribozymes, catalytic RNA, enzymatic RNA, catalytic DNA, aptazyme or aptamer-binding ribozyme, regulatable ribozyme, catalytic oligonucleotides, nucleozyme, DNAzyme, RNA enzyme, endoribonuclease, endonuclease, minizyme, leadzyme, oligozyme or DNA enzyme. All of these terminologies describe nucleic acid molecules with enzymatic activity. The specific enzymatic nucleic acid molecules described in the instant application are not limiting in the invention and those skilled in the art will recognize that all that is important in an enzymatic nucleic acid molecule of this invention is that it has a specific substrate binding site that is complementary to one or more of the target nucleic acid regions, and that it have nucleotide sequences within or surrounding that substrate binding site which impart a nucleic acid cleaving and/or ligation activity to the molecule (Cech et al., U.S. Pat. No. 4,987,071; Cech et al., 1988, 260 JAMA 3030).

[0065] By “nucleic acid molecule” as used herein is meant a molecule having nucleotides. The nucleic acid can be single, double, or multiple stranded and can comprise modified or unmodified nucleotides or non-nucleotides or various mixtures and combinations thereof. Exemplary nucleic acid molecules of the invention include enzymatic nucleic acid molecules, allozymes, antisense nucleic acids, 2-5A antisense chimeras, triplex forming oligonucleotides, decoy RNA, dsRNA, siRNA, aptamers, and/or antisense nucleic acids containing RNA cleaving chemical groups.

[0066] By “enzymatic portion” or “catalytic domain” is meant that portion/region of the enzymatic nucleic acid molecule essential for cleavage of a nucleic acid substrate (for example see FIGS. 1-4).

[0067] By “substrate binding arm” or “substrate binding domain” is meant that portion/region of a enzymatic nucleic acid that is able to interact, for example via complementarity (i.e., able to base-pair with), with a portion of its substrate. Such complementarity can be 100%, but can be less if desired. For example, as few as 10 bases out of 14 can be base-paired (see for example Werner and Uhlenbeck, 1995, Nucleic Acids Research, 23, 2092-2096; Hammann et al., 1999, Antisense and Nucleic Acid Drug Dev., 9, 25-31). Examples of such arms are shown generally in FIGS. 1-4. That is, these arms contain sequences within an enzymatic nucleic acid that are intended to bring enzymatic nucleic acid and target RNA together through complementary base-pairing interactions. The enzymatic nucleic acid of the invention can have binding arms that are contiguous or non-contiguous and can be of varying lengths. The length of the binding arm(s) can be greater than or equal to four nucleotides and of sufficient length to stably interact with a target RNA; in one embodiment they can be 12-100 nucleotides; in another embodiment they can be 14-24 nucleotides long (see for example Werner and Uhlenbeck, supra; Hamman et al., supra; Hampel et al., EP0360257; Berzal-Herranze et al., 1993, EMBO J., 12, 2567-73) or between 8 and 14 nucleotides long. If two binding arms are chosen, the design is such that the length of the binding arms are symmetrical (i.e., each of the binding arms is of the same length; e.g., four and four, five and five nucleotides, or six and six nucleotides, or seven and seven nucleotides long) or asymmetrical (i.e., the binding arms are of different length; e.g., three and five, six and three nucleotides; three and six nucleotides long; four and five nucleotides long; four and six nucleotides long; four and seven nucleotides long; and the like).

[0068] By “Inozyme” or “NCH” motif or configuration is meant, an enzymatic nucleic acid molecule comprising a motif as is generally described as NCH Rz in FIG. 1. Inozymes possess endonuclease activity to cleave RNA substrates having a cleavage triplet NCH/, where N is a nucleotide, C is cytidine and H is adenosine, uridine or cytidine, and/represents the cleavage site. H is used interchangeably with X. Inozymes can also possess endonuclease activity to cleave RNA substrates having a cleavage triplet NCN/, where N is a nucleotide, C is cytidine, and / represents the cleavage site. “I” r in FIG. 1 represents an Inosine nucleotide, including a ribo-Inosine or xylo-Inosine nucleoside.

[0069] By “G-cleaver” motif or configuration is meant, an enzymatic nucleic acid molecule comprising a motif as is generally described as G-cleaver Rz in FIG. 1. G-cleavers possess endonuclease activity to cleave RNA substrates having a cleavage triplet NYN/, where N is a nucleotide, Y is uridine or cytidine and / represents the cleavage site. G-cleavers can be chemically modified as is generally shown in FIG. 1.

[0070] By “amberzyme” motif or configuration is meant, an enzymatic nucleic acid molecule comprising a motif as is generally described in FIG. 2. Amberzymes possess endonuclease activity to cleave RNA substrates having a cleavage triplet NG/N, where N is a nucleotide, G is guanosine, and / represents the cleavage site. Amberzymes can be chemically modified to increase nuclease stability through substitutions as are generally shown in FIG. 2. In addition, differing nucleoside and/or non-nucleoside linkers can be used to substitute the 5′-gaaa-3′ loops shown in the figure. Amberzymes represent a non-limiting example of an enzymatic nucleic acid molecule that does not require a ribonucleotide (2′-OH) group within its own nucleic acid sequence for activity.

[0071] By “zinzyme” motif or configuration is meant, an enzymatic nucleic acid molecule comprising a motif as is generally described in FIG. 3. Zinzymes possess endonuclease activity to cleave RNA substrates having a cleavage triplet including but not limited to YG/Y, where Y is uridine or cytidine, and G is guanosine and / represents the cleavage site. Zinzymes can be chemically modified to increase nuclease stability through substitutions as are generally shown in FIG. 3, including substituting 2′-O-methyl guanosine nucleotides for guanosine nucleotides. In addition, differing nucleotide and/or non-nucleotide linkers can be used to substitute the 5′-gaaa-2′ loop shown in the figure. Zinzymes represent a non-limiting example of an enzymatic nucleic acid molecule that does not require a ribonucleotide (2′-OH) group within its own nucleic acid sequence for activity.

[0072] By ‘DNAzyme’ is meant, an enzymatic nucleic acid molecule that does not require the presence of a 2′-OH group within its own nucleic acid sequence for activity. In particular embodiments the enzymatic nucleic acid molecule can have an attached linker or linkers or other attached or associated groups, moieties, or chains containing one or more nucleotides with 2′-OH groups. DNAzymes can be synthesized chemically or expressed endogenously in vivo, by means of a single stranded DNA vector or equivalent thereof. An example of a DNAzyme is shown in FIG. 4 and is generally reviewed in Usman et al., U.S. Pat. No. 6,159,714; Chartrand et al., 1995, NAR 23, 4092; Breaker et al., 1995, Chem. Bio. 2, 655; Santoro et al., 1997, PNAS 94, 4262; Breaker, 1999, Nature Biotechnology, 17, 422-423; and Santoro et. al., 2000, J. Am. Chem. Soc., 122, 2433-39. The “10-23” DNAzyme motif is one particular type of DNAzyme that was evolved using in vitro selection (see Santoro et al., supra). Additional DNAzyme motifs can be selected for using techniques similar to those described in these references, and hence, are within the scope of the present invention.

[0073] By “sufficient length” is meant an oligonucleotide of greater than or equal to 3 nucleotides that is of a length great enough to provide the intended function under the expected condition. For example, for binding arms of enzymatic nucleic acid “sufficient length” means that the binding arm sequence is long enough to provide stable binding to a target site under the expected binding conditions. The binding arms are not so long as to prevent useful turnover of the nucleic acid molecule.

[0074] By “stably interact” is meant interaction of the oligonucleotides with target nucleic acid (e.g., by forming hydrogen bonds with complementary nucleotides in the target under physiological conditions) that is sufficient to the intended purpose (e.g., cleavage of target RNA by an enzyme).

[0075] By “equivalent” or “related” RNA to NOGO is meant to include those naturally occurring RNA molecules having homology (partial or complete) to NOGO-A, NOGO-B, NOGO-C and/or NOGO receptor proteins or encoding for proteins with similar function as NOGO or NOGO receptor proteins in various organisms, including human, rodent, primate, rabbit, pig, protozoans, fungi, plants, and other microorganisms and parasites. The equivalent RNA sequence also includes in addition to the coding region, regions such as 5′-untranslated region, 3′-untranslated region, introns, intron-exon junction and the like.

[0076] By “equivalent” or “related” RNA to IKK-gamma is meant to include those naturally occurring RNA molecules having homology (partial or complete) to IKK-gamma proteins or encoding for proteins with similar function as IKK-gamma proteins in various organisms, including human, rodent, primate, rabbit, pig, protozoans, fungi, plants, and other microorganisms and parasites. The equivalent RNA sequence also includes in addition to the coding region, regions such as 5′-untranslated region, 3′-untranslated region, introns, intron-exon junction and the like.

[0077] By “equivalent” or “related” RNA to PKR is meant to include those naturally occurring RNA molecules having homology (partial or complete) to PKR proteins or encoding for proteins with similar function as PKR proteins in various organisms, including human, rodent, primate, rabbit, pig, protozoans, fungi, plants, and other microorganisms and parasites. The equivalent RNA sequence also includes in addition to the coding region, regions such as 5′-untranslated region, 3′-untranslated region, introns, intron-exon junction and the like.

[0078] By “equivalent” or “related” RNA to PTGDS is meant to include RNA molecules having homology (partial or complete) to RNA molecules encoding PTGDS proteins or encoding proteins with similar function as PTGDS proteins in various organisms, including human, rodent, primate, rabbit, pig, plants, protozoans, fungi, and other microorganisms and parasites. The equivalent RNA sequence can also include in addition to the coding region, regions such as 5′-untranslated region, 3′-untranslated region, introns, intron-exon junction and the like.

[0079] By “equivalent” or “related” RNA to PTGDR is meant to include RNA molecules having homology (partial or complete) to RNA molecules encoding PTGDR proteins or encoding proteins with similar function as PTGDR proteins in various organisms, including human, rodent, primate, rabbit, pig, plants, protozoans, fungi, and other microorganisms and parasites. The equivalent RNA sequence can also include in addition to the coding region, regions such as 5′-untranslated region, 3′-untranslated region, introns, intron-exon junction and the like.

[0080] By “equivalent” or “related” RNA to ADORA1 is meant to include RNA molecules having homology (partial or complete) to RNA molecule encoding ADORA1 proteins or encoding proteins with similar function as ADORA1 proteins in various organisms, including human, rodent, primate, rabbit, pig, plants, protozoans, fungi, and other microorganisms and parasites. The equivalent RNA sequence can also include in addition to the coding region, regions such as 5′-untranslated region, 3′-untranslated region, introns, intron-exon junction and the like.

[0081] By “homology” is meant the nucleotide sequence of two or more nucleic acid molecules is partially or completely identical.

[0082] By “antisense nucleic acid”, it is meant a non-enzymatic nucleic acid molecule that binds to target RNA by means of RNA-RNA or RNA-DNA or RNA-PNA (protein nucleic acid; Egholm et al., 1993 Nature 365, 566) interactions and alters the activity of the target RNA (for a review, see Stein and Cheng, 1993 Science 261, 1004 and Woolf et al., U.S. Pat. No. 5,849,902). Typically, antisense molecules are complementary to a target sequence along a single contiguous sequence of the antisense molecule. However, in certain embodiments, an antisense molecule can bind to substrate such that the substrate molecule forms a loop, and/or an antisense molecule can bind such that the antisense molecule forms a loop. Thus, the antisense molecule can be complementary to two (or even more) non-contiguous substrate sequences or two (or even more) non-contiguous sequence portions of an antisense molecule can be complementary to a target sequence or both. For a review of current antisense strategies, see Schmajuk et al., 1999, J. Biol. Chem., 274, 21783-21789, Delihas et al., 1997, Nature, 15, 751-753, Stein et al., 1997, Antisense N. A. Drug Dev., 7, 151, Crooke, 2000, Methods Enzymol., 313, 3-45; Crooke, 1998, Biotech. Genet. Eng. Rev., 15, 121-157, Crooke, 1997, Ad. Pharmacol., 40, 1-49. In addition, antisense DNA can be used to target RNA by means of DNA-RNA interactions, thereby activating RNase H, which digests the target RNA in the duplex. The antisense oligonucleotides can comprise one or more RNAse H activating region, which is capable of activating RNAse H cleavage of a target RNA. Antisense DNA can be synthesized chemically or expressed via the use of a single stranded DNA expression vector or equivalent thereof.

[0083] By “RNase H activating region” is meant a region (generally greater than or equal to 4-25 nucleotides in length, and in one embodiment from 5-11 nucleotides in length) of a nucleic acid molecule capable of binding to a target RNA to form a non-covalent complex that is recognized by cellular RNase H enzyme (see for example Arrow et al., U.S. Pat. No. 5,849,902; Arrow et al., U.S. Pat. No. 5,989,912). The RNase H enzyme binds to the nucleic acid molecule-target RNA complex and cleaves the target RNA sequence. The RNase H activating region comprises, for example, phosphodiester, phosphorothioate (at least four of the nucleotides are phosphorothiote substitutions; and in another embodiment, 4-11 of the nucleotides are phosphorothiote substitutions); phosphorodithioate, 5′-thiophosphate, or methylphosphonate backbone chemistry or a combination thereof. In addition to one or more backbone chemistries described above, the RNase H activating region can also comprise a variety of sugar chemistries. For example, the RNase H activating region can comprise deoxyribose, arabino, fluoroarabino or a combination thereof, nucleotide sugar chemistry. Those skilled in the art will recognize that the foregoing are non-limiting examples and that any combination of phosphate, sugar and base chemistry of a nucleic acid that supports the activity of RNase H enzyme is within the scope of the definition of the RNase H activating region and the instant invention.

[0084] By “2-5A antisense chimera” is meant an antisense oligonucleotide containing a 5′-phosphorylated 2′-5′-linked adenylate residue. These chimeras bind to target RNA in a sequence-specific manner and activate a cellular 2-5A-dependent ribonuclease which, in turn, cleaves the target RNA (Torrence et al., 1993 Proc. Natl. Acad. Sci. USA 90, 1300; Silverman et al., 2000, Methods Enzymol., 313, 522-533; Player and Torrence, 1998, Pharmacol. Ther., 78, 55-113).

[0085] By “aptamer” or “nucleic acid aptamer” as used herein is meant a nucleic acid molecule that binds specifically to a target molecule wherein the nucleic acid molecule has sequence that is distinct from sequence recognized by the target molecule in its natural setting. Alternately, an aptamer can be a nucleic acid molecule that binds to a target molecule where the target molecule does not naturally bind to a nucleic acid. The target molecule can be any molecule of interest. For example, the aptamer can be used to bind to a ligand-binding domain of a protein, thereby preventing interaction of the naturally occurring ligand with the protein. This is a non-limiting example and those in the art will recognize that other embodiments can be readily generated using techniques generally known in the art, see for example Gold et al., 1995, Annu. Rev. Biochem., 64, 763; Brody and Gold, 2000, J. Biotechnol., 74, 5; Sun, 2000, Curr. Opin. Mol. Ther., 2, 100; Kusser, 2000, J. Biotechnol., 74, 27; Hermann and Patel, 2000, Science, 287, 820; and Jayasena, 1999, Clinical Chemistry, 45, 1628.

[0086] By “triplex forming oligonucleotides” is meant an oligonucleotide that can bind to a double-stranded DNA in a sequence-specific manner to form a triple-strand helix. Formation of such triple helix structure has been shown to inhibit transcription of the targeted gene (Duval-Valentin et al., 1992 Proc. Natl. Acad. Sci. USA 89, 504; Fox, 2000, Curr. Med. Chem., 7, 17-37; Praseuth et al., 2000, Biochim. Biophys. Acta, 1489, 181-206).

[0087] By “gene” it is meant a nucleic acid that encodes an RNA, for example, nucleic acid sequences including but not limited to structural genes encoding a polypeptide.

[0088] “Complementarity” refers to the ability of a nucleic acid to form hydrogen bond(s) with another RNA molecule by either traditional Watson-Crick or other non-traditional types. In reference to the nucleic molecules of the present invention, the binding free energy for a nucleic acid molecule with its target or complementary sequence is sufficient to allow the relevant function of the nucleic acid to proceed, e.g., enzymatic nucleic acid cleavage, antisense or triple helix inhibition. Determination of binding free energies for nucleic acid molecules is well known in the art (see, e.g., Turner et al., 1987, CSH Symp. Quant. Biol. LII pp. 123-133; Frier et al., 1986, Proc. Nat. Acad. Sci. USA 83:9373-9377; Turner et al., 1987, J. Am. Chem. Soc. 109:3783-3785). A percent complementarity indicates the percentage of contiguous residues in a nucleic acid molecule that can form hydrogen bonds (e.g., Watson-Crick base pairing) with a second nucleic acid sequence (e.g., 5, 6, 7, 8, 9, 10 out of 10 being 50%, 60%, 70%, 80%, 90%, and 100% complementary). “Perfectly complementary” means that all the contiguous residues of a nucleic acid sequence will hydrogen bond with the same number of contiguous residues in a second nucleic acid sequence.

[0089] By “RNA” is meant a molecule comprising at least one ribonucleotide residue. By “ribonucleotide” or “2′-OH” is meant a nucleotide with a hydroxyl group at the 2′ position of a β-D-ribo-furanose moiety.

[0090] By “decoy RNA” is meant an RNA molecule or aptamer that is designed to preferentially bind to a predetermined ligand. Such binding can result in the inhibition or activation of a target molecule. The decoy RNA or aptamer can compete with a naturally occurring binding target for the binding of a specific ligand. For example, it has been shown that over-expression of HIV trans-activation response (TAR) RNA can act as a “decoy” and efficiently binds HIV tat protein, thereby preventing it from binding to TAR sequences encoded in the HIV RNA (Sullenger et al., 1990, Cell, 63, 601-608). This is but a specific example and those in the art will recognize that other embodiments can be readily generated using techniques generally known in the art, see for example Gold et al., 1995, Annu. Rev. Biochem., 64, 763; Brody and Gold, 2000, J. Biotechnol., 74, 5; Sun, 2000, Curr. Opin. Mol. Ther., 2, 100; Kusser, 2000, J. Biotechnol., 74, 27; Hermann and Patel, 2000, Science, 287, 820; and Jayasena, 1999, Clinical Chemistry, 45, 1628. Similarly, a decoy RNA can be designed to bind to a D2 receptor and block the binding of PTGDS or a decoy RNA can be designed to bind to PTGDS and prevent interaction with the D2 receptor.

[0091] The term “short interfering RNA” or “siRNA” as used herein refers to a double stranded nucleic acid molecule capable of RNA interference “RNAi”, see for example Bass, 2001, Nature, 411, 428-429; Elbashir et al., 2001, Nature, 411, 494-498; and Kreutzer et al., International PCT Publication No. WO 00/44895; Zernicka-Goetz et al., International PCT Publication No. WO 01/36646; Fire, International PCT Publication No. WO 99/32619; Plaetinck et al., International PCT Publication No. WO 00/01846; Mello and Fire, International PCT Publication No. WO 01/29058; Deschamps-Depaillette, International PCT Publication No. WO 99/07409; and Li et al., International PCT Publication No. WO 00/44914. As used herein, siRNA molecules need not be limited to those molecules containing only RNA, but further encompasses chemically modified nucleotides and non-nucleotides.

[0092] The term “allozyme” as used herein refers to an allosteric enzymatic nucleic acid molecule, see, e.g., George et al., U.S. Pat. Nos. 5,834,186 and 5,741,679, Shih et al., U.S. Pat. No. 5,589,332, Nathan et al., U.S. Pat. No. 5,871,914, Nathan and Ellington, International PCT publication No. WO 00/24931, Breaker et al., International PCT Publication Nos. WO 00/26226 and 98/27104, and Sullenger et al., International PCT publication No. WO 99/29842. The term “2-5A chimera” as used herein refers to an oligonucleotide containing a 5′-phosphorylated 2′-5′-linked adenylate residue. These chimeras bind to target RNA in a sequence-specific manner and activate a cellular 2-5A-dependent ribonuclease which, in turn, cleaves the target RNA (Torrence et al., 1993 Proc. Natl. Acad. Sci. USA 90, 1300; Silverman et al., 2000, Methods Enzymol., 313, 522-533; Player and Torrence, 1998, Pharmacol. Ther., 78, 55-113).

[0093] The term “triplex forming oligonucleotides” as used herein refers to an oligonucleotide that can bind to a double-stranded DNA in a sequence-specific manner to form a triple-strand helix. Formation of such triple helix structure has been shown to inhibit transcription of the targeted gene (Duval-Valentin et al., 1992 Proc. Natl. Acad. Sci. USA 89, 504; Fox, 2000, Curr. Med. Chem., 7, 17-37; Praseuth et. al., 2000, Biochim. Biophys. Acta, 1489, 181-206).

[0094] Several varieties of naturally-occurring enzymatic RNAs are known presently. Each can catalyze the hydrolysis of RNA phosphodiester bonds in trans (and thus can cleave other RNA molecules) under physiological conditions. Table I summarizes some of the characteristics of these ribozymes. In general, enzymatic nucleic acids act by first binding to a target RNA. Such binding occurs through the target binding portion of a enzymatic nucleic acid that is held in close proximity to an enzymatic portion of the molecule that acts to cleave the target RNA. Thus, the enzymatic nucleic acid first recognizes and then binds a target RNA through complementary base-pairing, and once bound to the correct site, acts enzymatically to cut the target RNA. Strategic cleavage of such a target RNA will destroy its ability to direct synthesis of an encoded protein. After an enzymatic nucleic acid has bound and cleaved its RNA target, it is released from that RNA to search for another target and can repeatedly bind and cleave new targets. Thus, a single ribozyme molecule is able to cleave many molecules of target RNA. In addition, the ribozyme is a highly specific inhibitor of gene expression, with the specificity of inhibition depending not only on the base-pairing mechanism of binding to the target RNA, but also on the mechanism of target RNA cleavage.

[0095] Single mismatches, or base-substitutions, near the site of cleavage can completely eliminate catalytic activity of a ribozyme. In one embodiment of the inventions described herein, the enzymatic nucleic acid molecule is formed in a hammerhead or hairpin motif, but can also be formed in the motif of a hepatitis delta virus, group I intron, group II intron or RNase P RNA (in association with an RNA guide sequence), Neurospora VS RNA, DNAzymes, NCH cleaving motifs, or G-cleavers. Examples of such hammerhead motifs are described by Dreyfus, supra, Rossi et al., 1992, AIDS Research and Human Retroviruses 8, 183; of hairpin motifs by Hampel et al., EP0360257, Hampel and Tritz, 1989 Biochemistry 28, 4929, Feldstein et al., 1989, Gene 82, 53, Haseloff and Gerlach, 1989, Gene, 82, 43, and Hampel et al., 1990 Nucleic Acids Res. 18, 299; Chowrira & McSwiggen, U.S. Pat. No. 5,631,359; of the hepatitis delta virus motif is described by Perrotta and Been, 1992 Biochemistry 31, 16; of the RNase P motif by Guerrier-Takada et al., 1983 Cell 35, 849; Forster and Altman, 1990, Science 249, 783; Li and Altman, 1996, Nucleic Acids Res. 24, 835; Neurospora VS RNA ribozyme motif is described by Collins (Saville and Collins, 1990 Cell 61, 685-696; Saville and Collins, 1991 Proc. Natl. Acad. Sci. USA 88, 8826-8830; Collins and Olive, 1993 Biochemistry 32, 2795-2799; Guo and Collins, 1995, EMBO. J. 14, 363); Group II introns are described by Griffin et al., 1995, Chem. Biol. 2, 761; Michels and Pyle, 1995, Biochemistry 34, 2965; Pyle et al., International PCT Publication No. WO 96/22689; of the Group I intron by Cech et al., U.S. Pat. No. 4,987,071 and of DNAzymes by Usman et al., International PCT Publication No. WO 95/11304; Chartrand et al., 1995, NAR 23, 4092; Breaker et al., 1995, Chem. Bio. 2, 655; Santoro et al., 1997, PNAS 94, 4262, and Beigelman et al., International PCT publication No. WO 99/55857. NCH cleaving motifs are described in Ludwig & Sproat, International PCT Publication No. WO 98/58058; and G-cleavers are described in Kore et al., 1998, Nucleic Acids Research 26, 4116-4120 and Eckstein et al., International PCT Publication No. WO 99/16871. Additional motifs such as the Aptazyme (Breaker et al., WO 98/43993), Amberzyme (Class I motif; FIG. 2; Beigelman et al., U.S. Ser. No. 09/301,511) and Zinzyme (FIG. 3) (Beigelman et al., U.S. Ser. No. 09/301,511), all included by reference herein including drawings, can also be used in the present invention. These specific motifs or configurations are not limiting in the invention and those skilled in the art will recognize that all that is important in an enzymatic nucleic acid molecule of this invention is that it has a specific substrate binding site which is complementary to one or more of the target gene RNA regions, and that it have nucleotide sequences within or surrounding that substrate binding site which impart an RNA cleaving activity to the molecule (Cech et al., U.S. Pat. No. 4,987,071).

[0096] In one embodiment of the present invention, a nucleic acid molecule of the instant invention can be between 12 and 100 nucleotides in length. Exemplary enzymatic nucleic acid molecules of the invention are shown in Tables III-XXIII. For example, enzymatic nucleic acid molecules of the invention can be between 15 and 50 nucleotides in length, and in another embodiment between 25 and 40 nucleotides in length, e.g., 34, 36, or 38 nucleotides in length (for example see Jarvis et al., 1996, J. Biol. Chem., 271, 29107-29112). Exemplary DNAzymes of the invention are can between 15 and 40 nucleotides in length, and in one embodiment, between 25 and 35 nucleotides in length, e.g., 29, 30, 31, or 32 nucleotides in length (see, e.g., Santoro et al., 1998, Biochemistry, 37, 13330-13342; Chartrand et al., 1995, Nucleic Acids Research, 23, 4092-4096). Exemplary antisense molecules of the invention can be between 15 and 75 nucleotides in length, and in one embodiment between 20 and 35 nucleotides in length, e.g., 25, 26, 27, or 28 nucleotides in length (see for example Woolf et al., 1992, PNAS., 89, 7305-7309; Milner et al., 1997, Nature Biotechnology, 15, 537-541). Exemplary triplex forming oligonucleotide molecules of the invention are between 10 and 40 nucleotides in length, and in one embodiment are between 12 and 25 nucleotides in length, e.g., 18, 19, 20, or 21 nucleotides in length (see for example Maher et al., 1990, Biochemistry, 29, 8820-8826; Strobel and Dervan, 1990, Science, 249, 73-75). Those skilled in the art will recognize that all that is required is for the nucleic acid molecule to be of length and conformation sufficient and suitable for the nucleic acid molecule to catalyze a reaction contemplated herein. The length of the nucleic acid molecules of the instant invention are not limiting within the general limits stated.

[0097] In one embodiment, a nucleic acid molecule that modulates, for example, down-regulates, the expression of a target gene comprises between 8 and 100 bases complementary to a RNA molecule of prostaglandin D2 receptor (PTGDR), prostaglandin D2 synthetase (PTGDS), adenosine receptors (AR) such as adenosine receptor A1 (ADORA1), A2a, A2b, and A3, NOGO-A, NOGO-B, NOGO-C, NI-35, NI-220, NI-250, myelin-associated glycoprotein, tenascin-R, NG-2 and/or their corresponding receptors, an IkappaB kinase (IKK) subunit and/or protein kinase PKR. In another embodiment, a nucleic acid molecule that modulates the expression of a target gene comprises between 14 and 24 bases complementary to a RNA molecule of prostaglandin D2 receptor (PTGDR), prostaglandin D2 synthetase (PTGDS), adenosine receptors (AR) such as adenosine receptor A1 (ADORA1), A2a, A2b, and A3, NOGO-A, NOGO-B, NOGO-C, NI-35, NI-220, NI-250, myelin-associated glycoprotein, tenascin-R, NG-2 and/or their corresponding receptors, an IkappaB kinase (IKK) subunit and/or protein kinase PKR.

[0098] The invention provides a method for producing a class of nucleic acid-based gene modulating agents that exhibit a high degree of specificity for the RNA of a desired target. For example, the enzymatic nucleic acid molecule is can be targeted to a highly conserved sequence region of target RNAs encoding prostaglandin D2 receptor (PTGDR), prostaglandin D2 synthetase (PTGDS), adenosine receptors (AR) such as adenosine receptor A1 (ADORA1), A2a, A2b, and A3, NOGO-A, NOGO-B, NOGO-C, NI-35, NI-220, NI-250, myelin-associated glycoprotein, tenascin-R, NG-2 and/or their corresponding receptors, an IkappaB kinase (IKK) subunit and/or protein kinase PKR (e.g., prostaglandin D2 receptor (PTGDR)), prostaglandin D2 synthetase (PTGDS), adenosine receptors (AR) such as adenosine receptor A1 (ADORA1), A2a, A2b, and A3, NOGO-A, NOGO-B, NOGO-C, NI-35, NI-220, NI-250, myelin-associated glycoprotein, tenascin-R, NG-2 and/or their corresponding receptors, an IkappaB kinase (IKK) subunit and/or protein kinase PKR genes) such that specific treatment of a disease or condition can be provided with either one or several nucleic acid molecules of the invention. Such nucleic acid molecules can be delivered exogenously to specific tissue or cellular targets as required. Alternatively, the nucleic acid molecules (e.g., ribozymes, antisense, aptamers, and/or siRNA) can be expressed from DNA and/or RNA vectors that are delivered to specific cells.

[0099] As used in herein “cell” is used in its usual biological sense, and does not refer to an entire multicellular organism. The cell can, for example, be in vitro, e.g., in cell culture, or present in a multicellular organism, including, e.g., birds, plants and mammals such as humans, cows, sheep, apes, monkeys, swine, dogs, and cats. The cell may be prokaryotic (e.g., bacterial cell) or eukaryotic (e.g., mammalian or plant cell).

[0100] By “NOGO proteins” is meant, a protein, protein receptor or a mutant protein derivative thereof, comprising neuronal inhibitor activity, preferably CNS neuronal growth inhibitor activity.

[0101] By “IKK-gamma proteins” is meant, a peptide or protein comprising a IKK-gamma or NEMO/IKKAP1 component of the IKK complex, for example a regulatory IKK subunit involved in the assembly of the high molecular weight IKK complex and/or induction of NFKB.

[0102] By “PKR proteins” is meant, a peptide or protein comprising a protein kinase PKR activity, for example the activation of NFKB.

[0103] By “PTGDR proteins” is meant, a protein receptor or a mutant protein or peptide derivative thereof, having prostaglandin D2 receptor activity, for example, having the ability to bind prostaglandin D2 and/or having GTP-binding protein coupled activity.

[0104] By “PTGDS proteins” is meant, a prostaglandin synthetase protein or a mutant protein or peptide derivative thereof, having prostaglandin D2 synthetase activity, for example, having the ability to convert PGH2 to PGD2.

[0105] By “highly conserved sequence region” is meant, a nucleotide sequence of one or more regions in a target gene does not vary significantly from one generation to the other or from one biological system to the other.

[0106] The nucleic acid-based inhibitors of the invention can be added directly, or can be complexed with cationic lipids, packaged within liposomes, or otherwise delivered to target cells or tissues, for example by pulmonary delivery of an aerosol formulation with an inhaler or nebulizer. The nucleic acid or nucleic acid complexes can be locally administered to relevant tissues ex vivo, or in vivo through inhalation, injection or infusion pump, with or without their incorporation in biopolymers. In preferred embodiments, the enzymatic nucleic acid inhibitors comprise sequences that are complementary to the substrate sequences in Tables III to XXIII. Examples of such enzymatic nucleic acid molecules also are shown in Tables III to XXIII. Examples of such enzymatic nucleic acid molecules consist essentially of sequences defined in these tables.

[0107] In another embodiment, the invention features antisense nucleic acid molecules, siRNA and 2-5A chimeras including sequences complementary to the substrate sequences shown in Tables III to XXIII. Such nucleic acid molecules can include sequences as shown for the binding arms of the enzymatic nucleic acid molecules in Tables III to XXIII. Similarly, triplex molecules can be provided targeted to the corresponding DNA target regions, and containing the DNA equivalent of a target sequence or a sequence complementary to the specified target (substrate) sequence. Typically, antisense molecules are complementary to a target sequence along a single contiguous sequence of the antisense molecule. However, in certain embodiments, an antisense molecule can bind to substrate such that the substrate molecule forms a loop, and/or an antisense molecule can bind such that the antisense molecule forms a loop. Thus, the antisense molecule can be complementary to two (or even more) non-contiguous substrate sequences or two (or even more) non-contiguous sequence portions of an antisense molecule can be complementary to a target sequence or both.

[0108] By “consists essentially of” is meant that the active nucleic acid molecule of the invention, for example, an enzymatic nucleic acid molecule, contains an enzymatic center or core equivalent to those in the examples, and binding arms able to bind RNA such that cleavage at the target site occurs. Other sequences can be present that do not interfere with such cleavage. Thus, a core region can, for example, include one or more loop, stem-loop structure, or linker which does not prevent enzymatic activity. Thus, the underlined regions in the sequences in Tables III, IV, VIII, IX, XIII, XIV, XIX, and XX can be such a loop, stem-loop, nucleotide linker, and/or non-nucleotide linker and can be represented generally as sequence “X”. For example, a core sequence for a hammerhead enzymatic nucleic acid can comprise a conserved sequence, such as 5′-CUGAUGAG-3′ and 5′-CGAA-3′ connected by “X”, where X is 5′-GCCGUUAGGC-3′ (SEQ ID NO: 13274), or any other Stem II region known in the art, or a nucleotide and/or non-nucleotide linker. Similarly, for other nucleic acid molecules of the instant invention, such as Inozyme, G-cleaver, amberzyme, zinzyme, DNAzyme, antisense, 2-5A antisense, triplex forming nucleic acid, siRNA and decoy nucleic acids, other sequences or non-nucleotide linkers can be present that do not interfere with the function of the nucleic acid molecule.

[0109] Sequence X can be a linker of ≧2 nucleotides in length, including 3, 4, 5, 6, 7, 8, 9, 10, 15, 20, 26, 30, where the nucleotides can be internally base-paired to form a stem of ≧2 base pairs. Alternatively or in addition, sequence X can be a non-nucleotide linker. In yet another embodiment, the nucleotide linker X can be a nucleic acid aptamer, such as an ATP aptamer, HIV Rev aptamer (RRE), HIV Tat aptamer (TAR) and others (for a review see Gold et al., 1995, Annu. Rev. Biochem., 64, 763; and Szostak & Ellington, 1993, in The RNA World, ed. Gesteland and Atkins, pp. 511, CSH Laboratory Press). A “nucleic acid aptamer” as used herein is meant to indicate a nucleic acid sequence capable of interacting with a ligand. The ligand can be any natural or a synthetic molecule, including but not limited to a resin, metabolites, nucleosides, nucleotides, drugs, toxins, transition state analogs, peptides, lipids, proteins, amino acids, nucleic acid molecules, hormones, carbohydrates, receptors, cells, viruses, bacteria and others.

[0110] In yet another embodiment, the non-nucleotide linker X is as defined herein. The term “non-nucleotide” as used herein include either abasic nucleotide, polyether, polyamine, polyamide, peptide, carbohydrate, lipid, or polyhydrocarbon compounds. Specific examples include those described by Seela and Kaiser, Nucleic Acids Res. 1990, 18:6353 and Nucleic Acids Res. 1987, 15:3113; Cload and Schepartz, J. Am. Chem. Soc. 1991, 113:6324; Richardson and Schepartz, J. Am. Chem. Soc. 1991, 113:5109; Ma et al., Nucleic Acids Res. 1993, 21:2585 and Biochemistry 1993, 32:1751; Durand et al., Nucleic Acids Res. 1990, 18:6353; McCurdy et al., Nucleosides & Nucleotides 1991, 10:287; Jschke et al., Tetrahedron Lett. 1993, 34:301; Ono et al., Biochemistry 1991, 30:9914; Arnold et al., International Publication No. WO 89/02439; Usman et al., International Publication No. WO 95/06731; Dudycz et al., International Publication No. WO 95/11910 and Ferentz and Verdine, J. Am. Chem. Soc. 1991, 113:4000, all hereby incorporated by reference herein. A “non-nucleotide” further means any group or compound that can be incorporated into a nucleic acid chain in the place of one or more nucleotide units, including either sugar and/or phosphate substitutions, and allows the remaining bases to exhibit their enzymatic activity. The group or compound can be abasic in that it does not contain a commonly recognized nucleotide base, such as adenosine, guanine, cytosine, uracil or thymine. Thus, in a preferred embodiment, the invention features an enzymatic nucleic acid molecule having one or more non-nucleotide moieties, and having enzymatic activity to cleave an RNA or DNA molecule.

[0111] In another aspect of the invention, nucleic acid molecules that interact with target RNA molecules and down-regulate target genes (e.g., prostaglandin D2 receptor (PTGDR), prostaglandin D2 synthetase (PTGDS), adenosine receptors (AR) such as adenosine receptor A1 (ADORA1), A2a, A2b, and A3, NOGO-A, NOGO-B, NOGO-C, NI-35, NI-220, NI-250, myelin-associated glycoprotein, tenascin-R, NG-2 and/or their corresponding receptors, an IkappaB kinase (IKK) subunit and/or protein kinase PKR gene) activity are expressed from transcription units inserted into DNA or RNA vectors. The recombinant vectors can be DNA plasmids or viral vectors. Enzymatic nucleic acid molecule or antisense expressing viral vectors can be constructed based on, but not limited to, adeno-associated virus, retrovirus, adenovirus, or alphavirus. The recombinant vectors capable of expressing the enzymatic nucleic acid molecules or antisense can be delivered as described above, and persist in target cells. Alternatively, viral vectors can be used that provide for transient expression of enzymatic nucleic acid molecules or antisense. Such vectors can be repeatedly administered as necessary. Once expressed, the enzymatic nucleic acid molecules or antisense bind to the target RNA and down-regulate its function or expression. Delivery of enzymatic nucleic acid molecule or antisense expressing vectors can be systemic, such as by intravenous or intramuscular administration, by administration to target cells ex-planted from the patient followed by reintroduction into the patient, or by any other means that would allow for introduction into the desired target cell. Antisense DNA can be expressed via the use of a single stranded DNA intracellular expression vector.

[0112] By “vectors” is meant any nucleic acid- and/or viral-based technique used to deliver a desired nucleic acid.

[0113] By “patient” is meant an organism, which is a donor or recipient of explanted cells, or the cells themselves. “Patient” also refers to an organism to which the nucleic acid molecules of the invention can be administered. A patient can be a mammal or mammalian cells. In one embodiment, a patient is a human or human cells.

[0114] By “enhanced enzymatic activity” is meant to include activity measured in cells and/or in vivo where the activity is a reflection of both the catalytic activity and the stability of the nucleic acid molecules of the invention. In this invention, the product of these properties can be increased in vivo compared to an all RNA enzymatic nucleic acid or all DNA enzyme. In some cases, the activity or stability of the nucleic acid molecule can be decreased (i.e., less than ten-fold), but the overall activity of the nucleic acid molecule is enhanced, in vivo.

[0115] The nucleic acid molecules of the instant invention, individually, or in combination or in conjunction with other drugs, can be used to treat diseases or conditions discussed above. For example, to treat a disease or condition associated with the levels of prostaglandin D2 receptor (PTGDR), prostaglandin D2 synthetase (PTGDS), adenosine receptors (AR) such as adenosine receptor A1 (ADORA1), A2a, A2b, and A3, NOGO-A, NOGO-B, NOGO-C, NI-35, NI-220, NI-250, myelin-associated glycoprotein, tenascin-R, NG-2 and/or their corresponding receptors, an IkappaB kinase (IKK) subunit and/or protein kinase PKR, the patient can be treated, or other appropriate cells can be treated, as is evident to those skilled in the art, individually or in combination with one or more drugs under conditions suitable for the treatment.

[0116] In a further embodiment, the described molecules, such as antisense or enzymatic nucleic acid molecules, can be used in combination with other known treatments to treat conditions or diseases discussed above. For example, the described molecules can be used in combination with one or more known therapeutic agents to treat allergic diseases or conditions, including but not limited to asthma, allergic rhinitis, atopic dermatitis, and/or other allergic or inflammatory diseases and conditions which respond to the modulation of prostaglandin D2 receptor (PTGDR), prostaglandin D2 synthetase (PTGDS), adenosine receptors (AR) such as adenosine receptor A1 (ADORA1), A2a, A2b, and A3, NOGO-A, NOGO-B, NOGO-C, NI-35, NI-220, NI-250, myelin-associated glycoprotein, tenascin-R, NG-2 and/or their corresponding receptors, an IkappaB kinase (IKK) subunit and/or protein kinase PKR expression.

[0117] By “comprising” is meant including, but not limited to, whatever follows the word “comprising”. Thus, use of the term “comprising” indicates that the listed elements are required or mandatory, but that other elements are optional and may or may not be present. By “consisting of” is meant including, and limited to, whatever follows the phrase “consisting of”. Thus, the phrase “consisting of” indicates that the listed elements are required or mandatory, and that no other elements may be present.

[0118] Other features and advantages of the invention will be apparent from the following description of the preferred embodiments thereof, and from the claims.

### BRIEF DESCRIPTION OF THE DRAWINGS

[0119] FIG. 1 shows examples of chemically stabilized ribozyme motifs. HH Rz, represents hammerhead ribozyme motif (Usman et al., 1996, Curr. Op. Struct. Bio., 1, 527); NCH Rz represents the NCH ribozyme motif (Ludwig & Sproat, International PCT Publication No. WO 98/58058); G-Cleaver, represents G-cleaver ribozyme motif (Kore et al., 1998, Nucleic Acids Research 26, 4116-4120, Eckstein et al., International PCT publication No. WO 99/16871). N or n, represent independently a nucleotide that can be same or different and have complementarity to each other; rI, represents ribo-Inosine nucleotide; arrow indicates the site of cleavage within the target. Position 4 of the HH Rz and the NCH Rz is shown as having 2′-C-allyl modification, but those skilled in the art will recognize that this position can be modified with other modifications well known in the art, so long as such modifications do not significantly inhibit the activity of the ribozyme.

[0120] FIG. 2 shows an example of the Amberzyme ribozyme motif that is chemically stabilized (see for example Beigelman et al., International PCT publication No. WO 99/55857).

[0121] FIG. 3 shows an example of the Zinzyme A ribozyme motif that is chemically stabilized (see for example Beigelman et al., Beigelman et al., International PCT publication No. WO 99/55857).

[0122] FIG. 4 shows an example of a specific DNAzyme motif, commonly referred to as the “10-23 motif”, as described by Santoro et al., 1997, PNAS, 94, 4262.

### DESCRIPTION OF THE PREFERRED EMBODIMENTS

Nucleic Acid Molecules and Mechanism of Action

[0123] Antisense: Antisense molecules can be modified or unmodified RNA, DNA, or mixed polymer oligonucleotides and primarily function by specifically binding to matching sequences resulting in inhibition of peptide synthesis (Wu-Pong, November 1994, BioPharm, 20-33). The antisense oligonucleotide binds to target RNA by Watson Crick base-pairing and blocks gene expression by preventing ribosomal translation of the bound sequences either by steric blocking or by activating RNase H enzyme. Antisense molecules can also alter protein synthesis by interfering with RNA processing or transport from the nucleus into the cytoplasm (Mukhopadhyay & Roth, 1996, Crit. Rev. in Oncogenesis 7, 151-190).

[0124] In addition, binding of single stranded DNA to RNA can result in nuclease degradation of the heteroduplex (Wu-Pong, supra; Crooke, supra). To date, the only backbone modified DNA chemistry which act as substrates for RNase H are phosphorothioates, phosphorodithioates, and borontrifluoridates. Recently it has been reported that 2′-arabino and 2′-fluoro arabino-containing oligos can also activate RNase H activity.

[0125] A number of antisense molecules have been described that utilize novel configurations of chemically modified nucleotides, secondary structure, and/or RNase H substrate domains (Woolf et al., International PCT Publication No. WO 98/13526; Thompson et al., International PCT Publication No. WO 99/54459; Hartmann et al., U.S. Ser. No. 60/101,174, filed on Sep. 21, 1998) all of these are incorporated by reference herein in their entirety.

[0126] In addition, antisense deoxyoligoribonucleotides can be used to target RNA by means of DNA-RNA interactions, thereby activating RNase H, which digests the target RNA in the duplex. Antisense DNA can be expressed via the use of a single stranded DNA intracellular expression vector or equivalents and variations thereof.

[0127] Triplex Forming Oligonucleotides (TFO): Single stranded DNA can be designed to bind to genomic DNA in a sequence specific manner. TFOs are comprised of pyrimidine-rich oligonucleotides which bind DNA helices through Hoogsteen Base-pairing (Wu-Pong, supra). The resulting triple helix composed of the DNA sense, DNA antisense, and TFO disrupts RNA synthesis by RNA polymerase. The TFO mechanism can result in gene expression or cell death since binding can be irreversible (Mukhopadhyay & Roth, supra).

[0128] 2-5A Antisense Chimera: The 2-5A system is an interferon mediated mechanism for RNA degradation found in higher vertebrates (Mitra et al., 1996, Proc Nat Acad Sci USA 93, 6780-6785). Two types of enzymes, 2-5A synthetase and RNase L, are required for RNA cleavage. The 2-5A synthetases require double stranded RNA to form 2′-5′ oligoadenylates (2-5A). 2-5A then acts as an allosteric effector for utilizing RNase L, which has the ability to cleave single stranded RNA. The ability to form 2-5A structures with double stranded RNA makes this system particularly useful for inhibition of viral replication.

[0129] (2′-5′) oligoadenylate structures can be covalently linked to antisense molecules to form chimeric oligonucleotides capable of RNA cleavage (Torrence, supra). These molecules putatively bind and activate a 2-5A dependent RNase, the oligonucleotide/enzyme complex then binds to a target RNA molecule which can then be cleaved by the RNase enzyme.

[0130] Aptamer: Nucleic acid aptamers can be selected to specifically bind to a particular ligand of interest (see for example Gold et al., U.S. Pat. No. 5,567,588 and U.S. Pat. No. 5,475,096, Gold et al., 1995, Annu. Rev. Biochem., 64, 763; Brody and Gold, 2000, J. Biotechnol., 74, 5; Sun, 2000, Curr. Opin. Mol. Ther., 2, 100; Kusser, 2000, J. Biotechnol., 74, 27; Hermann and Patel, 2000, Science, 287, 820; and Jayasena, 1999, Clinical Chemistry, 45, 1628). For example, the use of in vitro selection can be applied to evolve nucleic acid aptamers with binding specificity for the NOGO receptor, prostaglandin D2 receptor (PTGDR), adenosine receptors (AR) such as adenosine receptor A1 (ADORA1), A2a, A2b, and A3, NOGO-A, NOGO-B, NOGO-C, NI-35, NI-220, NI-250, myelin-associated glycoprotein, tenascin-R, NG-2 and/or their corresponding receptors. Nucleic acid aptamers can include chemical modifications and linkers as described herein. Aptamer molecules of the invention that bind to a cellular receptor, such as prostaglandin D2 receptor (PTGDR), adenosine receptors (AR) such as adenosine receptor A1 (ADORA1), A2a, A2b, and A3, NOGO-A, NOGO-B, NOGO-C, NI-35, NI-220, NI-250, myelin-associated glycoprotein, tenascin-R, NG-2 and/or their corresponding receptors, or protein kinase PKR receptor, and modulate the activity of the receptor or ligand having specificity for the receptor.

[0131] RNAi: RNA interference refers to the process of sequence specific post transcriptional gene silencing in animals mediated by short interfering RNAs (siRNA) (Fire et al., 1998, Nature, 391, 806). The corresponding process in plants is commonly referred to as post transcriptional gene silencing or RNA silencing and is also referred to as quelling in fungi. The process of post transcriptional gene silencing is thought to be an evolutionarily conserved cellular defense mechanism used to prevent the expression of foreign genes which is commonly shared by diverse flora and phyla (Fire et al., 1999, Trends Genet., 15, 358). Such protection from foreign gene expression may have evolved in response to the production of double stranded RNAs (dsRNA) derived from viral infection or the random integration of transposon elements into a host genome via a cellular response that specifically destroys homologous single stranded RNA or viral genomic RNA. The presence of dsRNA in cells triggers the RNAi response though a mechanism that has yet to be fully characterized. This mechanism appears to be different from the interferon response that results from dsRNA mediated activation of protein kinase PKR and 2′,5′-oligoadenylate synthetase resulting in non-specific cleavage of mRNA by ribonuclease L.

[0132] The presence of long dsRNAs in cells stimulates the activity of a ribonuclease III enzyme referred to as dicer. Dicer is involved in the processing of the dsRNA into short pieces of dsRNA known as short interfering RNAs (siRNA) (Berstein et al., 2001, Nature, 409, 363). Short interfering RNAs derived from dicer activity are typically about 21-23 nucleotides in length and comprise about 19 base pair duplexes. Dicer has also been implicated in the excision of 21 and 22 nucleotide small temporal RNAs (stRNA) from precursor RNA of conserved structure that are implicated in translational control (Hutvagner et al., 2001, Science, 293, 834). The RNAi response also features an endonuclease complex containing a siRNA, commonly referred to as an RNA-induced silencing complex (RISC), which mediates cleavage of single stranded RNA having sequence homologous to the siRNA. Cleavage of the target RNA takes place in the middle of the region complementary to the guide sequence of the siRNA duplex (Elbashir et al., 2001, Genes Dev., 15, 188).

[0133] Short interfering RNA mediated RNAi has been studied in a variety of systems. Fire et al., 1998, Nature, 391, 806, were the first to observe RNAi in C. Elegans. Wianny and Goetz, 1999, Nature Cell Biol., 2, 70, describes RNAi mediated by dsRNA in mouse embryos. Hammond et al., 2000, Nature, 404, 293, describe RNAi in Drosophila cells transfected with dsRNA. Elbashir et al., 2001, Nature, 411, 494, describe RNAi induced by introduction of duplexes of synthetic 21-nucleotide RNAs in cultured mammalian cells including human embryonic kidney and HeLa cells. Recent work in Drosophila embryonic lysates has revealed certain requirements for siRNA length, structure, chemical composition, and sequence that are essential to mediate efficient RNAi activity. These studies have shown that 21 nucleotide siRNA duplexes are most active when containing two nucleotide 3′-overhangs. Furthermore, substitution of one or both siRNA strands with 2′-deoxy or 2′-O-methyl nucleotides abolishes RNAi activity, whereas substitution of 3′-terminal siRNA nucleotides with deoxy nucleotides was shown to be tolerated. Mismatch sequences in the center of the siRNA duplex were also shown to abolish RNAi activity. In addition, these studies also indicate that the position of the cleavage site in the target RNA is defined by the 5′-end of the siRNA guide sequence rather than the 3′-end (Elbashir et al., 2001, EMBO J., 20, 6877). Other studies have indicated that a 5′-phosphate on the target-complementary strand of a siRNA duplex is required for siRNA activity and that ATP is utilized to maintain the 5′-phosphate moiety on the siRNA (Nykanen et al., 2001, Cell, 107, 309), however siRNA molecules lacking a 5′-phosphate are active when introduced exogenously, suggesting that 5′-phosphorylation of siRNA constructs may occur in vivo.

[0134] Enzymatic Nucleic Acid: Several varieties of naturally-occurring enzymatic RNAs are presently known. In addition, several in vitro selection (evolution) strategies (Orgel, 1979, Proc. R. Soc. London, B 205, 435) have been used to evolve new nucleic acid catalysts capable of catalyzing cleavage and ligation of phosphodiester linkages (Joyce, 1989, Gene, 82, 83-87; Beaudry et al., 1992, Science 257, 635-641; Joyce, 1992, Scientific American 267, 90-97; Breaker et al., 1994, TIBTECH 12, 268; Bartel et al., 1993, Science 261:1411-1418; Szostak, 1993, TIBS 17, 89-93; Kumar et al., 1995, FASEB J., 9, 1183; Breaker, 1996, Curr. Op. Biotech., 7, 442; Santoro et al., 1997, Proc. Natl. Acad. Sci., 94, 4262; Tang et al., 1997, RNA 3, 914; Nakamaye & Eckstein, 1994, supra; Long & Uhlenbeck, 1994, supra; Ishizaka et al., 1995, supra; Vaish et al., 1997, Biochemistry 36, 6495; all of these are incorporated by reference herein). Each can catalyze a series of reactions including the hydrolysis of phosphodiester bonds in trans (and thus can cleave other RNA molecules) under physiological conditions.

[0135] The enzymatic nature of an enzymatic nucleic acid molecule has significant advantages, one advantage being that the concentration of enzymatic nucleic acid molecule necessary to affect a therapeutic treatment is lower. This advantage reflects the ability of the enzymatic nucleic acid molecule to act enzymatically. Thus, a single enzymatic nucleic acid molecule is able to cleave many molecules of target RNA. In addition, the enzymatic nucleic acid molecule is a highly specific inhibitor, with the specificity of inhibition depending not only on the base-pairing mechanism of binding to the target RNA, but also on the mechanism of target RNA cleavage. Single mismatches, or base-substitutions, near the site of cleavage can be chosen to completely eliminate catalytic activity of a enzymatic nucleic acid molecule.

[0136] Nucleic acid molecules having an endonuclease enzymatic activity are able to repeatedly cleave other separate RNA molecules in a nucleotide base sequence-specific manner. With the proper design, such enzymatic nucleic acid molecules can be targeted to RNA transcripts, and achieve efficient cleavage in vitro (Zaug et al., 324, Nature 429 1986; Uhlenbeck, 1987 Nature 328, 596; Kim et al., 84 Proc. Natl. Acad. Sci. USA 8788, 1987; Dreyfus, 1988, Einstein Quart. J. Bio. Med., 6, 92; Haseloff and Gerlach, 334 Nature 585, 1988; Cech, 260 JAMA 3030, 1988; and Jefferies et al., 17 Nucleic Acids Research 1371, 1989; Santoro et al., 1997 supra).

[0137] Because of their sequence specificity, trans-cleaving enzymatic nucleic acid molecules can be used as therapeutic agents for human disease (Usman & McSwiggen, 1995 Ann. Rep. Med. Chem. 30, 285-294; Christoffersen and Marr, 1995 J. Med. Chem. 38, 2023-2037). Enzymatic nucleic acid molecules can be designed to cleave specific RNA targets within the background of cellular RNA. Such a cleavage event renders the RNA non-functional and abrogates protein expression from that RNA. In this manner, synthesis of a protein associated with a disease state can be selectively inhibited (Warashina et al., 1999, Chemistry and Biology, 6, 237-250).

[0138] Enzymatic nucleic acid molecules of the invention that are allosterically regulated (“allozymes”) can be used to down-regulate prostaglandin D2 receptor (PTGDR), prostaglandin D2 synthetase (PTGDS), adenosine receptors (AR) such as adenosine receptor A1 (ADORA1), A2a, A2b, and A3, NOGO-A, NOGO-B, NOGO-C, NI-35, NI-220, NI-250, myelin-associated glycoprotein, tenascin-R, NG-2 and/or their corresponding receptors, an IkappaB kinase (IKK) subunit and/or protein kinase PKR expression. These allosteric enzymatic nucleic acids or allozymes (see for example George et al., U.S. Pat. Nos. 5,834,186 and 5,741,679, Shih et al., U.S. Pat. No. 5,589,332, Nathan et al., U.S. Pat. No. 5,871,914, Nathan and Ellington, International PCT publication No. WO 00/24931, Breaker et al., International PCT Publication Nos. WO 00/26226 and 98/27104, and Sullenger et al., International PCT publication No. WO 99/29842) are designed to respond to a signaling agent, for example, mutant and/or wild type protein, other proteins and/or RNAs involved in target gene signal transduction, compounds, metals, polymers, molecules and/or drugs that are targeted to target gene expressing cells etc., which in turn modulates the activity of the enzymatic nucleic acid molecule. In response to interaction with a predetermined signaling agent, the allosteric enzymatic nucleic acid molecule's activity is activated or inhibited such that the expression of a particular target is selectively down-regulated. The target can comprise wild-type protein, mutant protein, and/or a predetermined component of the protein's signal transduction pathway. In a specific example, allosteric enzymatic nucleic acid molecules that are activated by interaction with a RNA encoding a PTGDR protein are used as therapeutic agents in vivo. The presence of RNA encoding the PTGDS protein activates the allosteric enzymatic nucleic acid molecule that subsequently cleaves the RNA encoding a PTGDR protein resulting in the inhibition of PTGDR protein expression. In this manner, cells that express both PTGDS and PTGDR protein are selectively targeted.

[0139] In another non-limiting example, an allozyme can be activated by a prostaglandin D2 receptor (PTGDR), prostaglandin D2 synthetase (PTGDS), adenosine receptors (AR) such as adenosine receptor A1 (ADORA1), A2a, A2b, and A3, NOGO-A, NOGO-B, NOGO-C, NI-35, NI-220, NI-250, myelin-associated glycoprotein, tenascin-R, NG-2 and/or their corresponding receptors, an IkappaB kinase (IKK) subunit and/or protein kinase PKR protein, peptide, or mutant polypeptide that causes the allozyme to inhibit the expression of a target gene, by, for example, cleaving RNA encoded by the target gene. In this non-limiting example, the allozyme acts as a decoy to inhibit the function of the target protein and also inhibit the expression of the protein once activated by the prostaglandin D2 receptor (PTGDR), prostaglandin D2 synthetase (PTGDS), adenosine receptors (AR) such as adenosine receptor A1 (ADORA1), A2a, A2b, and A3, NOGO-A, NOGO-B, NOGO-C, NI-35, NI-220, NI-250, myelin-associated glycoprotein, tenascin-R, NG-2 and/or their corresponding receptors, an IkappaB kinase (IKK) subunit and/or protein kinase PKR protein.

Target Sites

[0140] Targets for useful enzymatic nucleic acid molecules and antisense nucleic acids can be determined as disclosed in Draper et al., WO 93/23569; Sullivan et al., WO 93/23057; Thompson et al., WO 94/02595; Draper et al., WO 95/04818; McSwiggen et al., U.S. Pat. No. 5,525,468, and hereby incorporated by reference herein in totality. Other examples include the following PCT applications, which concern inactivation of expression of disease-related genes: WO 95/23225, WO 95/13380, WO 94/02595, incorporated by reference herein. Rather than repeat the guidance provided in those documents here, below are provided specific examples of such methods, not limiting to those in the art. Enzymatic nucleic acid molecules and antisense to such targets are designed as described in those applications and synthesized to be tested in vitro and in vivo, as also described. The sequences of human prostaglandin D2 receptor (PTGDR), prostaglandin D2 synthetase (PTGDS), adenosine receptors (AR) such as adenosine receptor A1 (ADORA1), A2a, A2b, and A3, NOGO-A, NOGO-B, NOGO-C, NI-35, NI-220, NI-250, myelin-associated glycoprotein, tenascin-R, NG-2 and/or their corresponding receptors, an IkappaB kinase (IKK) subunit and/or protein kinase PKR RNAs were screened for optimal enzymatic nucleic acid and antisense target sites using a computer-folding algorithm. Antisense, hammerhead, DNAzyme, NCH, amberzyme, zinzyme, or G-Cleaver enzymatic nucleic acid molecule binding/cleavage sites were identified. These sites are shown in Tables III to XXIII (all sequences are 5′ to 3′ in the tables; underlined regions can be any sequence “X” or linker X, the actual sequence is not relevant here). The nucleotide base position is noted in the Tables as that site to be cleaved by the designated type of enzymatic nucleic acid molecule. While human sequences can be screened and enzymatic nucleic acid molecule and/or antisense thereafter designed, as discussed in Stinchcomb et al., WO 95/23225, mouse targeted enzymatic nucleic acid molecules can be useful to test efficacy of action of the enzymatic nucleic acid molecule and/or antisense prior to testing in humans.

[0141] Antisense, siRNA, hammerhead, DNAzyme, NCH, amberzyme, zinzyme or G-Cleaver enzymatic nucleic acid molecule binding/cleavage sites were identified. The nucleic acid molecules are individually analyzed by computer folding (Jaeger et al., 1989 Proc. Natl. Acad. Sci. USA, 86, 7706) to assess whether the sequences fold into the appropriate secondary structure. Those nucleic acid molecules with unfavorable intramolecular interactions such as between the binding arms and the catalytic core are eliminated from consideration. Varying binding arm lengths can be chosen to optimize activity.

[0142] Antisense, siRNA, hammerhead, DNAzyme, NCH, amberzyme, zinzyme or G-Cleaver enzymatic nucleic acid molecule binding/cleavage sites were identified and were designed to anneal to various sites in the RNA target. The binding arms are complementary to the target site sequences described above. The nucleic acid molecules were chemically synthesized. The method of synthesis used follows the procedure for normal DNA/RNA synthesis as described below and in Usman et al., 1987 J. Am. Chem. Soc., 109, 7845; Scaringe et al., 1990 Nucleic Acids Res., 18, 5433; and Wincott et al., 1995 Nucleic Acids Res. 23, 2677-2684; Caruthers et al., 1992, Methods in Enzymology 211, 3-19.

Synthesis of Nucleic Acid Molecules

[0143] Synthesis of nucleic acids greater than 100 nucleotides in length is difficult using automated methods, and the therapeutic cost of such molecules is prohibitive. In this invention, small nucleic acid motifs (“small refers to nucleic acid motifs less than about 100 nucleotides in length, and in one embodiment less than about 80 nucleotides in length, and in another embodiment less than about 50 nucleotides in length; e.g., antisense oligonucleotides, hammerhead or the NCH ribozymes) can be used for exogenous delivery. The simple structure of these molecules increases the ability of the nucleic acid to invade targeted regions of RNA structure. Exemplary molecules of the instant invention are chemically synthesized, and others can similarly be synthesized.

[0144] Oligonucleotides (e.g., antisense GeneBlocs) are synthesized using protocols known in the art as described in Caruthers et al., 1992, Methods in Enzymology 211, 3-19, Thompson et al., International PCT Publication No. WO 99/54459, Wincott et al., 1995, Nucleic Acids Res. 23, 2677-2684, Wincott et al., 1997, Methods Mol. Bio., 74, 59, Brennan et al., 1998, Biotechnol Bioeng., 61, 33-45, and Brennan, U.S. Pat. No. 6,001,311. All of these references are incorporated herein by reference. The synthesis of oligonucleotides makes use of common nucleic acid protecting and coupling groups, such as dimethoxytrityl at the 5′-end, and phosphoramidites at the 3′-end. In a non-limiting example, small scale syntheses are conducted on a 394 Applied Biosystems, Inc. synthesizer using a 0.2 μmol scale protocol with a 2.5 min coupling step for 2′-O-methylated nucleotides and a 45 sec coupling step for 2′-deoxy nucleotides. Table II outlines the amounts and the contact times of the reagents used in the synthesis cycle. Alternatively, syntheses at the 0.2 μmol scale can be performed on a 96-well plate synthesizer, such as the instrument produced by Protogene (Palo Alto, Calif.) with minimal modification to the cycle. A 33-fold excess (60 μL of 0.11 M=6.6 μmol) of 2′-O-methyl phosphoramidite and a 105-fold excess of S-ethyl tetrazole (60 μL of 0.25 M=15 μmol) can be used in each coupling cycle of 2′-O-methyl residues relative to polymer-bound 5′-hydroxyl. A 22-fold excess (40 μL of 0.11 M=4.4 μmol) of deoxy phosphoramidite and a 70-fold excess of S-ethyl tetrazole (40 μL of 0.25 M=10 μmol) can be used in each coupling cycle of deoxy residues relative to polymer-bound 5′-hydroxyl. Average coupling yields on the 394 Applied Biosystems, Inc. synthesizer, determined by colorimetric quantitation of the trityl fractions, are typically 97.5-99%. Other oligonucleotide synthesis reagents for the 394 Applied Biosystems, Inc. synthesizer include; detritylation solution is 3% TCA in methylene chloride (ABI); capping is performed with 16% N-methyl imidazole in THF (ABI) and 10% acetic anhydride/10% 2,6-lutidine in THF (ABI); and oxidation solution is 16.9 mM I₂, 49 mM pyridine, 9% water in THF (PERSEPTIVE™). Burdick & Jackson Synthesis Grade acetonitrile is used directly from the reagent bottle. S-Ethyltetrazole solution (0.25 M in acetonitrile) is made up from the solid obtained from American International Chemical, Inc. Alternately, for the introduction of phosphorothioate linkages, Beaucage reagent (3H-1,2-Benzodithiol-3-one 1,1-dioxide, 0.05 M in acetonitrile) is used.

[0145] Deprotection of the antisense oligonucleotides is performed as follows: the polymer-bound trityl-on oligoribonucleotide is transferred to a 4 mL glass screw top vial and suspended in a solution of 40% aq. methylamine (1 mL) at 65° C. for 10 min. After cooling to −20° C., the supernatant is removed from the polymer support. The support is washed three times with 1.0 mL of EtOH:MeCN:H2O/3:1:1, vortexed and the supernatant is then added to the first supernatant. The combined supernatants, containing the oligoribonucleotide, are dried to a white powder.

[0146] The method of synthesis used for normal RNA including certain enzymatic nucleic acid molecules follows the procedure as described in Usman et al., 1987, J. Am. Chem. Soc., 109, 7845; Scaringe et al., 1990, Nucleic Acids Res., 18, 5433; and Wincott et al., 1995, Nucleic Acids Res. 23, 2677-2684 Wincott et al., 1997, Methods Mol. Bio., 74, 59, and makes use of common nucleic acid protecting and coupling groups, such as dimethoxytrityl at the 5′-end, and phosphoramidites at the 3′-end. In a non-limiting example, small scale syntheses are conducted on a 394 Applied Biosystems, Inc. synthesizer using a 0.2 μmol scale protocol with a 7.5 min coupling step for alkylsilyl protected nucleotides and a 2.5 min coupling step for 2′-O-methylated nucleotides. Table II outlines the amounts and the contact times of the reagents used in the synthesis cycle. Alternatively, syntheses at the 0.2 μmol scale can be done on a 96-well plate synthesizer, such as the instrument produced by Protogene (Palo Alto, Calif.) with minimal modification to the cycle. A 33-fold excess (60 μL of 0.11 M=6.6 μmol) of 2′-O-methyl phosphoramidite and a 75-fold excess of S-ethyl tetrazole (60 μL of 0.25 M=15 μmol) can be used in each coupling cycle of 2′-O-methyl residues relative to polymer-bound 5′-hydroxyl. A 66-fold excess (120 μL of 0.11 M=13.2 μmol) of alkylsilyl (ribo) protected phosphoramidite and a 150-fold excess of S-ethyl tetrazole (120 μL of 0.25 M=30 μmol) can be used in each coupling cycle of ribo residues relative to polymer-bound 5′-hydroxyl. Average coupling yields on the 394 Applied Biosystems, Inc. synthesizer, determined by colorimetric quantitation of the trityl fractions, are typically 97.5-99%. Other oligonucleotide synthesis reagents for the 394 Applied Biosystems, Inc. synthesizer include; detritylation solution is 3% TCA in methylene chloride (ABI); capping is performed with 16% N-methyl imidazole in THF (ABI) and 10% acetic anhydride/10% 2,6-lutidine in THF (ABI); oxidation solution is 16.9 mM I₂, 49 mM pyridine, 9% water in THF (PERSEPTIVE™). Burdick & Jackson Synthesis Grade acetonitrile is used directly from the reagent bottle. S-Ethyltetrazole solution (0.25 M in acetonitrile) is made up from the solid obtained from American International Chemical, Inc. Alternately, for the introduction of phosphorothioate linkages, Beaucage reagent (3H-1,2-Benzodithiol-3-one 1,1-dioxide 0.05 M in acetonitrile) is used.

[0147] Deprotection of the RNA is performed using either a two-pot or one-pot protocol. For the two-pot protocol, the polymer-bound trityl-on oligoribonucleotide is transferred to a 4 mL glass screw top vial and suspended in a solution of 40% aq. methylamine (1 mL) at 65° C. for 10 min. After cooling to −20° C., the supernatant is removed from the polymer support. The support is washed three times with 1.0 mL of EtOH:MeCN:H2O/3:1:1, vortexed and the supernatant is then added to the first supernatant. The combined supernatants, containing the oligoribonucleotide, are dried to a white powder. The base deprotected oligoribonucleotide is resuspended in anhydrous TEA/HF/NMP solution (300 μL of a solution of 1.5 mL N-methylpyrrolidinone, 750 μL TEA and 1 mL TEA•3HF to provide a 1.4 M HF concentration) and heated to 65° C. After 1.5 h, the oligomer is quenched with 1.5 M NH₄HCO₃.

[0148] Alternatively, for the one-pot protocol, the polymer-bound trityl-on oligoribonucleotide is transferred to a 4 mL glass screw top vial and suspended in a solution of 33% ethanolic methylamine/DMSO: 1/1 (0.8 mL) at 65° C. for 15 min. The vial is brought to r.t. TEA•3HF (0.1 mL) is added and the vial is heated at 65° C. for 15 min. The sample is cooled at −20° C. and then quenched with 1.5 M NH₄HCO₃.

[0149] For purification of the trityl-on oligomers, the quenched NH₄HCO₃ solution is loaded onto a C-18 containing cartridge that had been prewashed with acetonitrile followed by 50 mM TEAA. After washing, the loaded cartridge with water, the RNA is detritylated with 0.5% TFA for 13 min. The cartridge is then washed again with water, salt exchanged with 1 M NaCl and washed with water again. The oligonucleotide is then eluted with 30% acetonitrile.

[0150] Inactive hammerhead ribozymes or binding attenuated control (BAC) oligonucleotides are synthesized by substituting a U for G₅ and a U for A14 (numbering from Hertel, K. J., et al., 1992, Nucleic Acids Res., 20, 3252). Similarly, one or more nucleotide substitutions can be introduced in other enzymatic nucleic acid molecules to inactivate the molecule and such molecules can serve as a negative control.

[0151] The average stepwise coupling yields are typically ≧98% (Wincott et al., 1995 Nucleic Acids Res. 23, 2677-2684). Those of ordinary skill in the art will recognize that the scale of synthesis can be adapted to be larger or smaller than the example described above including but not limited to 96 well format, all that is important is the ratio of chemicals used in the reaction.

[0152] Alternatively, the nucleic acid molecules of the present invention can be synthesized separately and joined together post-synthetically, for example by ligation (Moore et al., 1992, Science 256, 9923; Draper et al., International PCT publication No. WO 93/23569; Shabarova et al., 1991, Nucleic Acids Research 19, 4247; Bellon et al., 1997, Nucleosides & Nucleotides, 16, 951; Bellon et al., 1997, Bioconjugate Chem. 8, 204).

[0153] The nucleic acid molecules of the present invention can be modified extensively to enhance stability by modification with nuclease resistant groups, for example, 2′-amino, 2′-C-allyl, 2′-flouro, 2′-O-methyl, 2′-H (for a review see Usman and Cedergren, 1992, TIBS 17, 34; Usman et al., 1994, Nucleic Acids Symp. Ser. 31, 163). Ribozymes are purified by gel electrophoresis using general methods or are purified by high pressure liquid chromatography (HPLC; See Wincott et al., Supra, the totality of which is hereby incorporated herein by reference) and are re-suspended in water.

[0154] The sequences of the nucleic acid molecules, including enzymatic nucleic acid molecules and antisense, that are chemically synthesized, are shown in Tables III-XXIII. The sequences of the enzymatic nucleic acid constructs that are chemically synthesized are complementary to the Substrate sequences shown in Tables III-XXIII. Those in the art will recognize that these sequences are representative only of many more such sequences where the enzymatic portion of the enzymatic nucleic acid (all but the binding arms) is altered to affect activity. The enzymatic nucleic acid construct sequences listed in Tables III-XXIII can be formed of ribonucleotides or other nucleotides or non-nucleotides. Such enzymatic nucleic acid molecules with enzymatic activity are equivalent to the enzymatic nucleic acid molecules described specifically in the Tables.

Optimizing Activity of the Nucleic Acid Molecule of the Invention

[0155] Chemically synthesizing nucleic acid molecules with modifications (base, sugar and/or phosphate) that prevent their degradation by serum ribonucleases can increase their potency (see e.g., Eckstein et al., International Publication No. WO 92/07065; Perrault et al., 1990 Nature 344, 565; Pieken et al., 1991, Science 253, 314; Usman and Cedergren, 1992, Trends in Biochem. Sci. 17, 334; Usman et al., International Publication No. WO 93/15187; and Rossi et al., International Publication No. WO 91/03162; Sproat, U.S. Pat. No. 5,334,711; and Burgin et al., supra; all of these describe various chemical modifications that can be made to the base, phosphate and/or sugar moieties of the nucleic acid molecules herein). Modifications that enhance their efficacy in cells, and removal of bases from nucleic acid molecules to shorten oligonucleotide synthesis times and reduce chemical requirements are desired. (All these publications are hereby incorporated by reference herein).

[0156] There are several examples in the art describing sugar, base and phosphate modifications that can be introduced into nucleic acid molecules with significant enhancement in their nuclease stability and efficacy. For example, oligonucleotides are modified to enhance stability and/or enhance biological activity by modification with nuclease resistant groups, for example, 2′-amino, 2′-C-allyl, 2′-flouro, 2′-O-methyl, 2′-H, nucleotide base modifications (for a review see Usman and Cedergren, 1992, TIBS. 17, 34; Usman et al., 1994, Nucleic Acids Symp. Ser. 31, 163; Burgin et al., 1996, Biochemistry, 35, 14090). Sugar modification of nucleic acid molecules have been extensively described in the art (see Eckstein et al., International Publication PCT No. WO 92/07065; Perrault et al. Nature, 1990, 344, 565-568; Pieken et al. Science, 1991, 253, 314-317; Usman and Cedergren, Trends in Biochem. Sci., 1992, 17, 334-339; Usman et al. International Publication PCT No. WO 93/15187; Sproat, U.S. Pat. No. 5,334,711 and Beigelman et al., 1995, J. Biol. Chem., 270, 25702; Beigelman et al., International PCT publication No. WO 97/26270; Beigelman et al., U.S. Pat. No. 5,716,824; Usman et al., U.S. Pat. No. 5,627,053; Woolf et al., International PCT Publication No. WO 98/13526; Thompson et al., U.S. Ser. No. 60/082,404 which was filed on Apr. 20, 1998; Karpeisky et al., 1998, Tetrahedron Lett., 39, 1131; Earnshaw and Gait, 1998, Biopolymers (Nucleic acid Sciences), 48, 39-55; Verma and Eckstein, 1998, Annu. Rev. Biochem., 67, 99-134; and Burlina et al., 1997, Bioorg. Med. Chem., 5, 1999-2010; all of the references are hereby incorporated in their totality by reference herein). Such publications describe general methods and strategies to determine the location of incorporation of sugar, base and/or phosphate modifications and the like into ribozymes without inhibiting catalysis, and are incorporated by reference herein. In view of such teachings, similar modifications can be used as described herein to modify the nucleic acid molecules of the instant invention.

[0157] While chemical modification of oligonucleotide internucleotide linkages with phosphorothioate, phosphorothioate, and/or 5′-methylphosphonate linkages improves stability, too many of these modifications can cause some toxicity. Therefore when designing nucleic acid molecules the amount of these internucleotide linkages should be minimized. The reduction in the concentration of these linkages should lower toxicity resulting in increased efficacy and higher specificity of these molecules.

[0158] Nucleic acid molecules having chemical modifications that maintain or enhance activity are provided. Such a nucleic acid is also generally more resistant to nucleases than an unmodified nucleic acid. Thus, in a cell and/or in vivo the activity may not be significantly lowered. Therapeutic nucleic acid molecules delivered exogenously are optimally stable within cells until translation of the target RNA has been inhibited long enough to reduce the levels of the undesirable protein. This period of time varies between hours to days depending upon the disease state. Clearly, nucleic acid molecules must be resistant to nucleases in order to function as effective intracellular therapeutic agents. Improvements in the chemical synthesis of RNA and DNA (Wincott et al., 1995 Nucleic Acids Res. 23, 2677; Caruthers et al., 1992, Methods in Enzymology 211, 3-19 (incorporated by reference herein) have expanded the ability to modify nucleic acid molecules by introducing nucleotide modifications to enhance their nuclease stability as described above.

[0159] In one embodiment, nucleic acid molecules of the invention include one or more G-clamp nucleotides. A G-clamp nucleotide is a modified cytosine analog wherein modifications result in the ability to hydrogen bond both Watson-Crick and Hoogsteen faces of a complementary guanine within a duplex, see for example Lin and Matteucci, 1998, J. Am. Chem. Soc., 120, 8531-8532. A single G-clamp analog substation within an oligonucleotide can result in substantially enhanced helical thermal stability and mismatch discrimination when hybridized to complementary oligonucleotides. The inclusion of such nucleotides in nucleic acid molecules of the invention can enable both enhanced affinity and specificity to nucleic acid targets.

[0160] Therapeutic nucleic acid molecules (e.g., enzymatic nucleic acid molecules and antisense nucleic acid molecules) delivered exogenously are optimally stable within cells until translation of the target RNA has been inhibited long enough to reduce the levels of the undesirable protein. This period of time varies between hours to days depending upon the disease state. These nucleic acid molecules should be resistant to nucleases in order to function as effective intracellular therapeutic agents. Improvements in the chemical synthesis of nucleic acid molecules described in the instant invention and in the art have expanded the ability to modify nucleic acid molecules by introducing nucleotide modifications to enhance their nuclease stability as described above.

[0161] In another embodiment, the invention features conjugates and/or complexes of nucleic acid molecules targeting prostaglandin D2 receptor (PTGDR), prostaglandin D2 synthetase (PTGDS), adenosine receptors (AR) such as adenosine receptor A1 (ADORA1), A2a, A2b, and A3, NOGO-A, NOGO-B, NOGO-C, NI-35, NI-220, NI-250, myelin-associated glycoprotein, tenascin-R, NG-2 and/or their corresponding receptors, an IkappaB kinase (IKK) subunit and/or protein kinase PKR. Compositions and conjugates are used to facilitate delivery of molecules into a biological system, such as cells. The conjugates provided by the instant invention can impart therapeutic activity by transferring therapeutic compounds across cellular membranes, altering the pharmacokinetics, and/or modulating the localization of nucleic acid molecules of the invention. The present invention encompasses the design and synthesis of novel agents for the delivery of molecules, including but not limited to small molecules, lipids, phospholipids, nucleosides, nucleotides, nucleic acids, antibodies, toxins, negatively charged polymers and other polymers, for example proteins, peptides, hormones, carbohydrates, polyethylene glycols, or polyamines, across cellular membranes. In general, the transporters described are designed to be used either individually or as part of a multi-component system, with or without degradable linkers. These compounds are expected to improve delivery and/or localization of nucleic acid molecules of the invention into a number of cell types originating from different tissues, in the presence or absence of serum (see Sullenger and Cech, U.S. Pat. No. 5,854,038). Conjugates of the molecules described herein can be attached to biologically active molecules via linkers that are biodegradable, such as biodegradable nucleic acid linker molecules.

[0162] The term “biodegradable nucleic acid linker molecule” as used herein, refers to a nucleic acid molecule that is designed as a biodegradable linker to connect one molecule to another molecule, for example, a biologically active molecule. The stability of the biodegradable nucleic acid linker molecule can be modulated by using various combinations of ribonucleotides, deoxyribonucleotides, and chemically modified nucleotides, for example 2′-O-methyl, 2′-fluoro, 2′-amino, 2′-O-amino, 2′-C-allyl, 2′-O-allyl, and other 2′-modified or base modified nucleotides. The biodegradable nucleic acid linker molecule can be a dimer, trimer, tetramer or longer nucleic acid molecule, for example an oligonucleotide of about 2, 3, 4, 5, 6, 7, 8, 9, 10, 11, 12, 13, 14, 15, 16, 17, 18, 19, or 20 nucleotides in length, or can comprise a single nucleotide with a phosphorus based linkage, for example a phosphoramidate or phosphodiester linkage. The biodegradable nucleic acid linker molecule can also comprise nucleic acid backbone, nucleic acid sugar, or nucleic acid base modifications.

[0163] The term “biodegradable” as used herein, refers to degradation in a biological system, for example enzymatic degradation or chemical degradation.

[0164] The term “biologically active molecule” as used herein, refers to compounds or molecules that are capable of eliciting or modifying a biological response in a system. Non-limiting examples of biologically active molecules contemplated by the instant invention include therapeutically active molecules such as antibodies, hormones, antivirals, peptides, proteins, chemotherapeutics, small molecules, vitamins, co-factors, nucleosides, nucleotides, oligonucleotides, enzymatic nucleic acids, antisense nucleic acids, triplex forming oligonucleotides, 2,5-A chimeras, siRNA, dsRNA, allozymes, aptamers, decoys and analogs thereof. Biologically active molecules of the invention also include molecules capable of modulating the pharmacokinetics and/or pharmacodynamics of other biologically active molecules, for example lipids and polymers such as polyamines, polyamides, polyethylene glycol and other polyethers.

[0165] The term “phospholipid” as used herein, refers to a hydrophobic molecule comprising at least one phosphorus group. For example, a phospholipid can comprise a phosphorus containing group and saturated or unsaturated alkyl group, optionally substituted with OH, COOH, oxo, amine, or substituted or unsubstituted aryl groups.

[0166] In another embodiment, nucleic acid catalysts having chemical modifications that maintain or enhance enzymatic activity are provided. Such nucleic acids are also generally more resistant to nucleases than unmodified nucleic acids. Thus, in a cell and/or in vivo the activity of the nucleic acid may not be significantly lowered. As exemplified herein such enzymatic nucleic acids are useful in a cell and/or in vivo even if activity over all is reduced 10 fold (Burgin et al., 1996, Biochemistry, 35, 14090). Such enzymatic nucleic acids herein are said to “maintain” the enzymatic activity of an all RNA ribozyme or all DNA DNAzyme.

[0167] In another aspect the nucleic acid molecules comprise a 5′ and/or a 3′-cap structure.

[0168] By “cap structure” is meant chemical modifications, which have been incorporated at either terminus of the oligonucleotide (see for example Wincott et al., WO 97/26270, incorporated by reference herein). These terminal modifications protect the nucleic acid molecule from exonuclease degradation, and can help in delivery and/or localization within a cell. The cap can be present at the 5′-terminus (5′-cap) or at the 3′-terminus (3′-cap) or can be present on both terminus. In non-limiting examples, the 5′-cap includes inverted abasic residue (moiety), 4′,5′-methylene nucleotide; 1-(beta-D-erythrofuranosyl) nucleotide, 4′-thio nucleotide, carbocyclic nucleotide; 1,5-anhydrohexitol nucleotide; L-nucleotides; alpha-nucleotides; modified base nucleotide; phosphorodithioate linkage; threo-pentofuranosyl nucleotide; acyclic 3′,4′-seco nucleotide; acyclic 3,4-dihydroxybutyl nucleotide; acyclic 3,5-dihydroxypentyl nucleotide, 3′-3′-inverted nucleotide moiety; 3′-3′-inverted abasic moiety; 3′-2′-inverted nucleotide moiety; 3′-2′-inverted abasic moiety; 1,4-butanediol phosphate; 3′-phosphoramidate; hexylphosphate; aminohexyl phosphate; 3′-phosphate; 3′-phosphorothioate; phosphorodithioate; or bridging or non-bridging methylphosphonate moiety (for more details see Wincott et al., International PCT publication No. WO 97/26270, incorporated by reference herein).

[0169] In another embodiment the 3′-cap includes, for example 4′,5′-methylene nucleotide; 1-(beta-D-erythrofuranosyl) nucleotide; 4′-thio nucleotide, carbocyclic nucleotide; 5′-amino-alkyl phosphate; 1,3-diamino-2-propyl phosphate, 3-aminopropyl phosphate; 6-aminohexyl phosphate; 1,2-aminododecyl phosphate; hydroxypropyl phosphate; 1,5-anhydrohexitol nucleotide; L-nucleotide; alpha-nucleotide; modified base nucleotide; phosphorodithioate; threo-pentofuranosyl nucleotide; acyclic 3′,4′-seco nucleotide; 3,4-dihydroxybutyl nucleotide; 3,5-dihydroxypentyl nucleotide, 5′-5′-inverted nucleotide moiety; 5′-5′-inverted abasic moiety; 5′-phosphoramidate; 5′-phosphorothioate; 1,4-butanediol phosphate; 5′-amino; bridging and/or non-bridging 5′-phosphoramidate, phosphorothioate and/or phosphorodithioate, bridging or non bridging methylphosphonate and 5′-mercapto moieties (for more details see Beaucage and Iyer, 1993, Tetrahedron 49, 1925; incorporated by reference herein).

[0170] By the term “non-nucleotide” is meant any group or compound that can be incorporated into a nucleic acid chain in the place of one or more nucleotide units, including either sugar and/or phosphate substitutions, and allows the remaining bases to exhibit their enzymatic activity. The group or compound is abasic in that it does not contain a commonly recognized nucleotide base, such as adenosine, guanine, cytosine, uracil or thymine.

[0171] An “alkyl” group refers to a saturated aliphatic hydrocarbon, including straight-chain, branched-chain, and cyclic alkyl groups. The alkyl group can have, for example, 1 to 12 carbons. In one embodiment of the invention, the alkyl group is a lower alkyl of from 1 to 7 carbons. In another embodiment the alkyl group is 1 to 4 carbons. The alkyl group can be substituted or unsubstituted. When substituted the substituted group(s) can be hydroxyl, cyano, alkoxy, ═O, ═S, NO₂ or N(CH₃)₂, amino, or SH. The term also includes alkenyl groups which are unsaturated hydrocarbon groups containing at least one carbon-carbon double bond, including straight-chain, branched-chain, and cyclic groups. The alkenyl group can have, for example, 1 to 12 carbons. In one embodiment of the invention the alkenyl group can be a lower alkenyl of from 1 to 7 carbons. In another embodiment the alkenyl group can be 1 to 4 carbons. The alkenyl group can be substituted or unsubstituted. When substituted the substituted group(s) can be, for example, hydroxyl, cyano, alkoxy, ═O, ═S, NO₂, halogen, N(CH₃)₂, amino, or SH. The term “alkyl” also includes alkynyl groups which have an unsaturated hydrocarbon group containing at least one carbon-carbon triple bond, including straight-chain, branched-chain, and cyclic groups. The alkynyl group can have, for example, 1 to 12 carbons. In one embodiment of the invention, the alkynyl group is a lower alkynyl of from 1 to 7 carbons. In another embodiment of the invention, the alkynyl group is 1 to 4 carbons. The alkynyl group can be substituted or unsubstituted. When substituted the substituted group(s) can be, for example, hydroxyl, cyano, alkoxy, ═O, ═S, NO₂ or N(CH3)₂, amino or SH.

[0172] Such alkyl groups can also include aryl, alkylaryl, carbocyclic aryl, heterocyclic aryl, amide and ester groups. An “aryl” group refers to an aromatic group which has at least one ring having a conjugated p electron system and includes carbocyclic aryl, heterocyclic aryl and biaryl groups, all of which can be optionally substituted. The preferred substituent(s) of aryl groups are halogen, trihalomethyl, hydroxyl, SH, OH, cyano, alkoxy, alkyl, alkenyl, alkynyl, and amino groups. An “alkylaryl” group refers to an alkyl group (as described above) covalently joined to an aryl group (as described above). Carbocyclic aryl groups are groups wherein the ring atoms on the aromatic ring are all carbon atoms. The carbon atoms are optionally substituted. Heterocyclic aryl groups are groups having from 1 to 3 heteroatoms as ring atoms in the aromatic ring and the remainder of the ring atoms are carbon atoms. Suitable heteroatoms include oxygen, sulfur, and nitrogen, and include furanyl, thienyl, pyridyl, pyrrolyl, N-lower alkyl pyrrolo, pyrimidyl, pyrazinyl, imidazolyl and the like, all optionally substituted. An “amide” refers to an —C(O)—NH—R, where R is either alkyl, aryl, alkylaryl or hydrogen. An “ester” refers to an —C(O)—OR′, where R is either alkyl, aryl, alkylaryl or hydrogen.

[0173] By “nucleotide” is meant a heterocyclic nitrogenous base in N-glycosidic linkage with a phosphorylated sugar. Nucleotides are recognized in the art to include natural bases (standard), and modified bases well known in the art. Such bases are generally located at the 1′ position of a nucleotide sugar moiety. Nucleotides generally comprise a base, sugar and a phosphate group. The nucleotides can be unmodified or modified at the sugar, phosphate and/or base moiety, (also referred to interchangeably as nucleotide analogs, modified nucleotides, non-natural nucleotides, non-standard nucleotides and other; see for example, Usman and McSwiggen, supra; Eckstein et al., International PCT Publication No. WO 92/07065; Usman et al., International PCT Publication No. WO 93/15187; Uhlman & Peyman, supra all are hereby incorporated by reference herein). There are several examples of modified nucleic acid bases known in the art as summarized by Limbach et al., 1994, Nucleic Acids Res. 22, 2183. Some of the non-limiting examples of chemically modified and other natural nucleic acid bases that can be introduced into nucleic acids include, for example, inosine, purine, pyridin-4-one, pyridin-2-one, phenyl, pseudouracil, 2, 4, 6-trimethoxy benzene, 3-methyl uracil, dihydrouridine, naphthyl, aminophenyl, 5-alkylcytidines (e.g., 5-methylcytidine), 5-alkyluridines (e.g., ribothymidine), 5-halouridine (e.g., 5-bromouridine) or 6-azapyrimidines or 6-alkylpyrimidines (e.g. 6-methyluridine), propyne, quesosine, 2-thiouridine, 4-thiouridine, wybutosine, wybutoxosine, 4-acetylcytidine, 5-(carboxyhydroxymethyl)uridine, 5′-carboxymethylaminomethyl-2-thiouridine, 5-carboxymethylaminomethyluridine, beta-D-galactosylqueosine, 1-methyladenosine, 1-methylinosine, 2,2-dimethylguanosine, 3-methylcytidine, 2-methyladenosine, 2-methylguanosine, N6-methyladenosine, 7-methylguanosine, 5-methoxyaminomethyl-2-thiouridine, 5-methylaminomethyluridine, 5-methylcarbonylmethyluridine, 5-methyloxyuridine, 5-methyl-2-thiouridine, 2-methylthio-N-6-isopentenyladenosine, beta-D-mannosylqueosine, uridine-5-oxyacetic acid, 2-thiocytidine, threonine derivatives and others (Burgin et al., 1996, Biochemistry, 35, 14090; Uhlman & Peyman, supra). By “modified bases” in this aspect is meant nucleotide bases other than adenine, guanine, cytosine and uracil at 1′ position or their equivalents; such bases can be used at any position, for example, within the catalytic core of an enzymatic nucleic acid molecule and/or in the substrate-binding regions of the nucleic acid molecule.

[0174] By “nucleoside” is meant a heterocyclic nitrogenous base in N-glycosidic linkage with a sugar. Nucleosides are recognized in the art to include natural bases (standard), and modified bases well known in the art. Such bases are generally located at the 1′ position of a nucleoside sugar moiety. Nucleosides generally comprise a base and sugar group. The nucleosides can be unmodified or modified at the sugar, and/or base moiety, (also referred to interchangeably as nucleoside analogs, modified nucleosides, non-natural nucleosides, non-standard nucleosides and other; see for example, Usman and McSwiggen, supra; Eckstein et al., International PCT Publication No. WO 92/07065; Usman et al., International PCT Publication No. WO 93/15187; Uhlman & Peyman, supra all are hereby incorporated by reference herein). There are several examples of modified nucleic acid bases known in the art as summarized by Limbach et al., 1994, Nucleic Acids Res. 22, 2183. Some of the non-limiting examples of chemically modified and other natural nucleic acid bases that can be introduced into nucleic acids include, inosine, purine, pyridin-4-one, pyridin-2-one, phenyl, pseudouracil, 2,4,6-trimethoxy benzene, 3-methyl uracil, dihydrouridine, naphthyl, aminophenyl, 5-alkylcytidines (e.g., 5-methylcytidine), 5-alkyluridines (e.g., ribothymidine), 5-halouridine (e.g., 5-bromouridine) or 6-azapyrimidines or 6-alkylpyrimidines (e.g. 6-methyluridine), propyne, quesosine, 2-thiouridine, 4-thiouridine, wybutosine, wybutoxosine, 4-acetylcytidine, 5-(carboxyhydroxymethyl)uridine, 5′-carboxymethylaminomethyl-2-thiouridine, 5-carboxymethylaminomethyluridine, beta-D-galactosylqueosine, 1-methyladenosine, 1-methylinosine, 2,2-dimethylguanosine, 3-methylcytidine, 2-methyladenosine, 2-methylguanosine, N6-methyladenosine, 7-methylguanosine, 5-methoxyaminomethyl-2-thiouridine, 5-methylaminomethyluridine, 5-methylcarbonylmethyluridine, 5-methyloxyuridine, 5-methyl-2-thiouridine, 2-methylthio-N-6-isopentenyladenosine, beta-D-mannosylqueosine, uridine-5-oxyacetic acid, 2-thiocytidine, threonine derivatives and others (Burgin et al., 1996, Biochemistry, 35, 14090; Uhlman & Peyman, supra). By “modified bases” in this aspect is meant nucleoside bases other than adenine, guanine, cytosine and uracil at 1′ position or their equivalents; such bases can be used at any position, for example, within the catalytic core of an enzymatic nucleic acid molecule and/or in the substrate-binding regions of the nucleic acid molecule.

[0175] In one embodiment, the invention features modified enzymatic nucleic acid molecules with phosphate backbone modifications comprising one or more phosphorothioate, phosphorodithioate, methylphosphonate, morpholino, amidate carbamate, carboxymethyl, acetamidate, polyamide, sulfonate, sulfonamide, sulfamate, formacetal, thioformacetal, and/or alkylsilyl, substitutions. For a review of oligonucleotide backbone modifications see Hunziker and Leumann, 1995, Nucleic Acid Analogues: Synthesis and Properties, in Modern Synthetic Methods, VCH, 331-417, and Mesmaeker et al., 1994, Novel Backbone Replacements for Oligonucleotides, in Carbohydrate Modifications in Antisense Research, ACS, 24-39. These references are hereby incorporated by reference herein.

[0176] By “abasic” is meant sugar moieties lacking a base or having other chemical groups in place of a base at the 1′ position, for example a 3′,3′-linked or 5′,5′-linked deoxyabasic ribose derivative (for more details see Wincott et al., International PCT publication No. WO 97/26270).

[0177] By “unmodified nucleoside” is meant one of the bases adenine, cytosine, guanine, thymine, uracil joined to the 1′ carbon of β-D-ribo-furanose.

[0178] By “modified nucleoside” is meant any nucleotide base that contains a modification in the chemical structure of an unmodified nucleotide base, sugar and/or phosphate.

[0179] In connection with 2′-modified nucleotides as described for the present invention, by “amino” is meant 2′-NH₂ or 2′-O—NH₂, which can be modified or unmodified. Such modified groups are described, for example, in Eckstein et al., U.S. Pat. No. 5,672,695 and Matulic-Adamic et al., WO 98/28317, respectively, which are both incorporated by reference in their entireties.

[0180] Various modifications to nucleic acid (e.g., antisense and ribozyme) structure can be made to enhance the utility of these molecules. For example, such modifications can enhance shelf-life, half-life in vitro, stability, and ease of introduction of such oligonucleotides to the target site, including e.g., enhancing penetration of cellular membranes and conferring the ability to recognize and bind to targeted cells.

[0181] Use of the nucleic acid-based molecules of the invention can lead to better treatment of the disease progression by affording the possibility of combination therapies (e.g., multiple enzymatic nucleic acid molecules targeted to different genes, enzymatic nucleic acid molecules coupled with known small molecule inhibitors, or intermittent treatment with combinations of enzymatic nucleic acid molecules (including different enzymatic nucleic acid molecule motifs) and/or other chemical or biological molecules). The treatment of patients with nucleic acid molecules can also include combinations of different types of nucleic acid molecules. Therapies can be devised which include a mixture of enzymatic nucleic acid molecules (including different enzymatic nucleic acid molecule motifs), antisense and/or 2-5A chimera molecules to one or more targets to alleviate symptoms of a disease.

Administration of Nucleic Acid Molecules

[0182] Methods for the delivery of nucleic acid molecules are described in Akhtar et al., 1992, Trends Cell Bio., 2, 139; and Delivery Strategies for Antisense Oligonucleotide Therapeutics, ed. Akhtar, 1995 which are both incorporated herein by reference. Sullivan et al., PCT WO 94/02595, further describes the general methods for delivery of enzymatic RNA molecules. These protocols can be utilized for the delivery of virtually any nucleic acid molecule. Nucleic acid molecules can be administered to cells by a variety of methods known to those familiar to the art, including, but not restricted to, encapsulation in liposomes, by iontophoresis, or by incorporation into other vehicles, such as hydrogels, cyclodextrins, biodegradable nanocapsules, and bioadhesive microspheres. The nucleic acid molecules or the invention are administered via pulmonary delivery, such as by inhalation of an aerosol or spray dried formulation administered by an inhalation device or nebulizer. Alternatively, the nucleic acid/vehicle combination is locally delivered by direct injection or by use of an infusion pump. Other routes of delivery include, but are not limited to oral (tablet or pill form) and/or intrathecal delivery (Gold, 1997, Neuroscience, 76, 1153-1158). Other approaches include the use of various transport and carrier systems, for example though the use of conjugates and biodegradable polymers. For a comprehensive review on drug delivery strategies including CNS delivery, see Ho et al., 1999, Curr. Opin. Mol. Ther., 1, 336-343 and Jain, Drug Delivery Systems: Technologies and Commercial Opportunities, Decision Resources, 1998 and Groothuis et al., 1997, J. NeuroVirol., 3, 387-400. More detailed descriptions of nucleic acid delivery and administration are provided in Sullivan et al., supra, Draper et al., PCT WO93/23569, Beigelman et al., PCT WO99/05094, and Klimuk et al., PCT WO99/04819 all of which have been incorporated by reference herein.

[0183] Experiments have demonstrated the efficient in vivo uptake of nucleic acids by neurons. As an example of local administration of nucleic acids to nerve cells, Sommer et al., 1998, Antisense Nuc. Acid Drug Dev., 8, 75, describe a study in which a 15mer phosphorothioate antisense nucleic acid molecule to c-fos is administered to rats via microinjection into the brain. Antisense molecules labeled with tetramethylrhodamine-isothiocyanate (TRITC) or fluorescein isothiocyanate (FITC) were taken up by exclusively by neurons thirty minutes post-injection. A diffuse cytoplasmic staining and nuclear staining was observed in these cells. As an example of systemic administration of nucleic acid to nerve cells, Epa et al., 2000, Antisense Nuc. Acid Drug Dev., 10, 469, describe an in vivo mouse study in which beta-cyclodextrin-adamantane-oligonucleotide conjugates were used to target the p75 neurotrophin receptor in neuronally differentiated PC12 cells. Following a two week course of IP administration, pronounced uptake of p75 neurotrophin receptor antisense was observed in dorsal root ganglion (DRG) cells. In addition, a marked and consistent down-regulation of p75 was observed in DRG neurons. Additional approaches to the targeting of nucleic acid to neurons are described in Broaddus et al., 1998, J. Neurosurg., 88(4), 734; Karle et al., 1997, Eur. J. Pharmocol., 340(2/3), 153; Bannai et al., 1998, Brain Research, 784(1,2), 304; Rajakumar et al., 1997, Synapse, 26(3), 199; Wu-pong et al., 1999, BioPharm, 12(1), 32; Bannai et al., 1998, Brain Res. Protoc., 3(1), 83; Simantov et al., 1996, Neuroscience, 74(1), 39. Nucleic acid molecules of the invention are therefore amenable to delivery to and uptake by cells that express NOGO and NOGO receptors for modulation of NOGO and/or NOGO receptor expression.

[0184] The delivery of nucleic acid molecules of the invention, targeting NOGO and NOGO receptors is provided by a variety of different strategies. Traditional approaches to CNS delivery that can be used include, but are not limited to, intrathecal and intracerebroventricular administration, implantation of catheters and pumps, direct injection or perfusion at the site of injury or lesion, injection into the brain arterial system, or by chemical or osmotic opening of the blood-brain barrier. Other approaches can include the use of various transport and carrier systems, for example though the use of conjugates and biodegradable polymers. Furthermore, gene therapy approaches, for example as described in Kaplitt et al., U.S. Pat. No. 6,180,613, can be used to express nucleic acid molecules in the CNS.

[0185] The molecules of the instant invention can be used as pharmaceutical agents. Pharmaceutical agents prevent, inhibit the occurrence, or treat (alleviate a symptom to some extent, or all of the symptoms) of a disease state in a patient.

[0186] The negatively charged polynucleotides of the invention can be administered (e.g., RNA, DNA or protein) and introduced into a patient by any standard means, with or without stabilizers, buffers, and the like, to form a pharmaceutical composition. When it is desired to use a liposome delivery mechanism, standard protocols for formation of liposomes can be followed. The compositions of the present invention can also be formulated and used as tablets, capsules or elixirs for oral administration; suppositories for rectal administration; sterile solutions; suspensions for injectable administration; and the other compositions known in the art.

[0187] The present invention also includes pharmaceutically acceptable formulations of the compounds described. These formulations include salts of the above compounds, e.g., acid addition salts, for example, salts of hydrochloric, hydrobromic, acetic acid, and benzene sulfonic acid.

[0188] A pharmacological composition or formulation refers to a composition or formulation in a form suitable for administration, e.g., local administration or systemic administration, into a cell or patient, including, for example, a human. Suitable forms, in part, depend upon the use or the route of entry, for example oral, transdermal, or by injection. Such forms should not prevent the composition or formulation from reaching a target cell (i.e., a cell to which the negatively charged polymer is desired to be delivered to). For example, pharmacological compositions injected into the blood stream should be soluble. Other factors are known in the art, and include considerations such as toxicity and forms which prevent the composition or formulation from exerting its effect.

[0189] By “local administration” is meant in vivo local absorption or accumulation of drugs in the specific tissue, organ, or compartment of the body. Administration routes that can lead to local absorption include, without limitations: inhalation, direct injection, or dermatological applications.

[0190] By “systemic administration” is meant in vivo systemic absorption or accumulation of drugs in the blood stream followed by distribution throughout the entire body. Administration routes which lead to systemic absorption include, without limitations: intravenous, subcutaneous, intraperitoneal, inhalation, oral, intrapulmonary and intramuscular. Each of these administration routes expose the desired compound, e.g., nucleic acids, to an accessible diseased tissue. The rate of entry of a drug into the circulation has been shown to be a function of molecular weight or size. The use of a liposome or other drug carrier comprising the compounds of the instant invention, for example PEG or phospholipids conjugates, can potentially localize the drug, for example, in certain tissue types, such as the tissues of the reticular endothelial system (RES). A nucleic acid formulation that can facilitate the association of drug with the surface of cells, such as, lymphocytes and macrophages is also useful. This approach can provide enhanced delivery of the drug to target cells by taking advantage of the specificity of macrophage and lymphocyte immune recognition of abnormal cells.

[0191] Both local and systemic administration approaches can be used to administer nucleic acid molecules of the invention for the treatment of asthma or related conditions. In one embodiment, the nucleic acid molecule or formulation comprising the nucleic acid molecule is administered to a patient with an inhaler or nebulizer, providing rapid local uptake of the nucleic acid molecules into relevant pulmonary tissues. In another embodiment, the nucleic acid molecule or formulation comprising the nucleic acid molecule is administered to a patient systemically, for example by intravenous or subcutaneous injection, providing sustained uptake of the nucleic acid molecules into relevant bodily tissues.

[0192] By pharmaceutically acceptable formulation is meant, a composition or formulation that allows for the effective distribution of the nucleic acid molecules of the instant invention in the physical location most suitable for their desired activity. Non-limiting examples of agents suitable for formulation with the nucleic acid molecules of the instant invention include: PEG conjugated nucleic acids, phospholipid conjugated nucleic acids, nucleic acids containing lipophilic moieties, phosphorothioates, P-glycoprotein inhibitors (such as Pluronic P85) which can enhance entry of drugs into various tissues, for exaple the CNS (Jolliet-Riant and Tillement, 1999, Fundam. Clin. Pharmacol., 13, 16-26); biodegradable polymers, such as poly(DL-lactide-coglycolide) microspheres for sustained release delivery after implantation (Emerich, D F et al, 1999, Cell Transplant, 8, 47-58) Alkermes, Inc. Cambridge, Mass.; and loaded nanoparticles, such as those made of polybutylcyanoacrylate, which can deliver drugs across the blood brain barrier and can alter neuronal uptake mechanisms (Prog Neuropsychopharmacol Biol Psychiatry, 23, 941-949, 1999). Other non-limiting examples of delivery strategies, including CNS delivery of the nucleic acid molecules of the instant invention include material described in Boado et al., 1998, J. Pharm. Sci., 87, 1308-1315; Tyler et al., 1999, FEBS Lett., 421, 280-284; Pardridge et al., 1995, PNAS USA., 92, 5592-5596; Boado, 1995, Adv. Drug Delivery Rev., 15, 73-107; Aldrian-Herrada et al., 1998, Nucleic Acids Res., 26, 4910-4916; and Tyler et al., 1999, PNAS USA., 96, 7053-7058. All these references are hereby incorporated herein by reference.

[0193] The invention also features the use of the composition comprising surface-modified liposomes containing poly(ethylene glycol) lipids (PEG-modified, or long-circulating liposomes or stealth liposomes). Nucleic acid molecules of the invention can also comprise covalently attached PEG molecules of various molecular weights. These formulations offer a method for increasing the accumulation of drugs in target tissues. This class of drug carriers resists opsonization and elimination by the mononuclear phagocytic system (MPS or RES), thereby enabling longer blood circulation times and enhanced tissue exposure for the encapsulated drug (Lasic et al. Chem. Rev. 1995, 95, 2601-2627; Ishiwata et al., Chem. Pharm. Bull 1995, 43, 1005-1011). Such liposomes have been shown to accumulate selectively in tumors, presumably by extravasation and capture in the neovascularized target tissues (Lasic et al., Science 1995, 267, 1275-1276; Oku et al., 1995, Biochim. Biophys. Acta, 1238, 86-90). The long-circulating liposomes enhance the pharmacokinetics and pharmacodynamics of DNA and RNA, particularly compared to conventional cationic liposomes which are known to accumulate in tissues of the MPS (Liu et al., J. Biol. Chem. 1995, 42, 24864-24870; Choi et al., International PCT Publication No. WO 96/10391; Ansell et al., International PCT Publication No. WO 96/10390; Holland et al., International PCT Publication No. WO 96/10392; all of which are incorporated by reference herein). Long-circulating liposomes are also likely to protect drugs from nuclease degradation to a greater extent compared to cationic liposomes, based on their ability to avoid accumulation in metabolically aggressive MPS tissues such as the liver and spleen. All of these references are incorporated by reference herein.

[0194] The present invention also includes compositions prepared for storage or administration that include a pharmaceutically effective amount of the desired compounds in a pharmaceutically acceptable carrier or diluent. Acceptable carriers or diluents for therapeutic use are well known in the pharmaceutical art, and are described, for example, in Remington's Pharmaceutical Sciences, Mack Publishing Co. (A.R. Gennaro edit. 1985) hereby incorporated by reference herein. For example, preservatives, stabilizers, dyes and flavoring agents can be provided. These include sodium benzoate, sorbic acid and esters of p-hydroxybenzoic acid. In addition, antioxidants and suspending agents can be used.

[0195] A pharmaceutically effective dose is that dose required to prevent, inhibit the occurrence, or treat (alleviate a symptom to some extent, or all of the symptoms) of a disease state. The pharmaceutically effective dose depends on the type of disease, the composition used, the route of administration, the type of mammal being treated, the physical characteristics of the specific mammal under consideration, concurrent medication, and other factors which those skilled in the medical arts will recognize. Generally, an amount between 0.1 mg/kg and 100 mg/kg body weight/day of active ingredients is administered dependent upon potency of the negatively charged polymer.

[0196] The nucleic acid molecules of the invention and formulations thereof can be administered orally, topically, parenterally, by inhalation or spray or rectally in dosage unit formulations containing conventional non-toxic pharmaceutically acceptable carriers, adjuvants and vehicles. The term parenteral as used herein includes percutaneous, subcutaneous, intravascular (e.g., intravenous), intramuscular, or intrathecal injection or infusion techniques and the like. In addition, there is provided a pharmaceutical formulation comprising a nucleic acid molecule of the invention and a pharmaceutically acceptable carrier. One or more nucleic acid molecules of the invention can be present in association with one or more non-toxic pharmaceutically acceptable carriers and/or diluents and/or adjuvants, and if desired other active ingredients. The pharmaceutical compositions containing nucleic acid molecules of the invention can be in a form suitable for oral use, for example, as tablets, troches, lozenges, aqueous or oily suspensions, dispersible powders or granules, emulsion, hard or soft capsules, or syrups or elixirs.

[0197] Compositions intended for oral use can be prepared according to any method known to the art for the manufacture of pharmaceutical compositions and such compositions can contain one or more such sweetening agents, flavoring agents, coloring agents or preservative agents in order to provide pharmaceutically elegant and palatable preparations. Tablets contain the active ingredient in admixture with non-toxic pharmaceutically acceptable excipients that are suitable for the manufacture of tablets. These excipients can be for example, inert diluents, such as calcium carbonate, sodium carbonate, lactose, calcium phosphate or sodium phosphate; granulating and disintegrating agents, for example, corn starch, or alginic acid; binding agents, for example starch, gelatin or acacia, and lubricating agents, for example magnesium stearate, stearic acid or talc. The tablets can be uncoated or they can be coated by known techniques. In some cases such coatings can be prepared by known techniques to delay disintegration and absorption in the gastrointestinal tract and thereby provide a sustained action over a longer period. For example, a time delay material such as glyceryl monosterate or glyceryl distearate can be employed.

[0198] Formulations for oral use can also be presented as hard gelatin capsules wherein the active ingredient is mixed with an inert solid diluent, for example, calcium carbonate, calcium phosphate or kaolin, or as soft gelatin capsules wherein the active ingredient is mixed with water or an oil medium, for example peanut oil, liquid paraffin or olive oil.

[0199] Aqueous suspensions contain the active materials in admixture with excipients suitable for the manufacture of aqueous suspensions. Such excipients are suspending agents, for example sodium carboxymethylcellulose, methylcellulose, hydropropyl-methylcellulose, sodium alginate, polyvinylpyrrolidone, gum tragacanth and gum acacia; dispersing or wetting agents can be a naturally-occurring phosphatide, for example, lecithin, or condensation products of an alkylene oxide with fatty acids, for example polyoxyethylene stearate, or condensation products of ethylene oxide with long chain aliphatic alcohols, for example heptadecaethyleneoxycetanol, or condensation products of ethylene oxide with partial esters derived from fatty acids and a hexitol such as polyoxyethylene sorbitol monooleate, or condensation products of ethylene oxide with partial esters derived from fatty acids and hexitol anhydrides, for example polyethylene sorbitan monooleate. The aqueous suspensions can also contain one or more preservatives, for example ethyl, or n-propyl p-hydroxybenzoate, one or more coloring agents, one or more flavoring agents, and one or more sweetening agents, such as sucrose or saccharin.

[0200] Oily suspensions can be formulated by suspending the active ingredients in a vegetable oil, for example arachis oil, olive oil, sesame oil or coconut oil, or in a mineral oil such as liquid paraffin. The oily suspensions can contain a thickening agent, for example beeswax, hard paraffin or cetyl alcohol. Sweetening agents and flavoring agents can be added to provide palatable oral preparations. These compositions can be preserved by the addition of an anti-oxidant such as ascorbic acid.

[0201] Dispersible powders and granules suitable for preparation of an aqueous suspension by the addition of water provide the active ingredient in admixture with a dispersing or wetting agent, suspending agent and one or more preservatives. Suitable dispersing or wetting agents or suspending agents are exemplified by those already mentioned above. Additional excipients, for example sweetening, flavoring and coloring agents, can also be present.

[0202] Pharmaceutical compositions of the invention can also be in the form of oil-in-water emulsions. The oily phase can be a vegetable oil or a mineral oil or mixtures of these. Suitable emulsifying agents can be naturally-occurring gums, for example gum acacia or gum tragacanth, naturally-occurring phosphatides, for example soy bean, lecithin, and esters or partial esters derived from fatty acids and hexitol, anhydrides, for example sorbitan monooleate, and condensation products of the said partial esters with ethylene oxide, for example polyoxyethylene sorbitan monooleate. The emulsions can also contain sweetening and flavoring agents.

[0203] Syrups and elixirs can be formulated with sweetening agents, for example glycerol, propylene glycol, sorbitol, glucose or sucrose. Such formulations can also contain a demulcent, a preservative and flavoring and coloring agents. The pharmaceutical compositions can be in the form of a sterile injectable aqueous or oleaginous suspension. This suspension can be formulated according to the known art using those suitable dispersing or wetting agents and suspending agents that have been mentioned above. The sterile injectable preparation can also be a sterile injectable solution or suspension in a non-toxic parentally acceptable diluent or solvent, for example as a solution in 1,3-butanediol. Among the acceptable vehicles and solvents that can be employed are water, Ringer's solution and isotonic sodium chloride solution. In addition, sterile, fixed oils are conventionally employed as a solvent or suspending medium. For this purpose any bland fixed oil can be employed including synthetic mono- or diglycerides. In addition, fatty acids such as oleic acid find use in the preparation of injectables.

[0204] The nucleic acid molecules of the invention can also be administered in the form of suppositories, e.g., for rectal administration of the drug. These compositions can be prepared by mixing the drug with a suitable non-irritating excipient that is solid at ordinary temperatures but liquid at the rectal temperature and will therefore melt in the rectum to release the drug. Such materials include cocoa butter and polyethylene glycols.

[0205] Nucleic acid molecules of the invention can be administered parenterally in a sterile medium. The drug, depending on the vehicle and concentration used, can either be suspended or dissolved in the vehicle. Advantageously, adjuvants such as local anesthetics, preservatives and buffering agents can be dissolved in the vehicle.

[0206] Dosage levels of the order of from about 0.1 mg to about 140 mg per kilogram of body weight per day are useful in the treatment of the above-indicated conditions (about 0.5 mg to about 7 g per patient per day). The amount of active ingredient that can be combined with the carrier materials to produce a single dosage form varies depending upon the host treated and the particular mode of administration. Dosage unit forms generally contain between from about 1 mg to about 500 mg of an active ingredient.

[0207] It is understood that the specific dose level for any particular patient depends upon a variety of factors including the activity of the specific compound employed, the age, body weight, general health, sex, diet, time of administration, route of administration, and rate of excretion, drug combination and the severity of the particular disease undergoing therapy.

[0208] For administration to non-human animals, the composition can also be added to the animal feed or drinking water. It can be convenient to formulate the animal feed and drinking water compositions so that the animal takes in a therapeutically appropriate quantity of the composition along with its diet. It can also be convenient to present the composition as a premix for addition to the feed or drinking water.

[0209] The nucleic acid molecules of the present invention can also be administered to a patient in combination with other therapeutic compounds to increase the overall therapeutic effect. The use of multiple compounds to treat an indication can increase the beneficial effects while reducing the presence of side effects.

[0210] Alternatively, certain of the nucleic acid molecules of the instant invention can be expressed within cells from eukaryotic promoters (e.g., Izant and Weintraub, 1985, Science, 229, 345; McGarry and Lindquist, 1986, Proc. Natl. Acad. Sci., USA 83, 399; Scanlon et al., 1991, Proc. Natl. Acad. Sci. USA, 88, 10591-5; Kashani-Sabet et al., 1992, Antisense Res. Dev., 2, 3-15; Dropulic et al., 1992, J. Virol., 66, 1432-41; Weerasinghe et al., 1991, J. Virol., 65, 5531-4; Ojwang et al., 1992, Proc. Natl. Acad. Sci. USA, 89, 10802-6; Chen et al., 1992, Nucleic Acids Res., 20, 4581-9; Sarver et al., 1990 Science, 247, 1222-1225; Thompson et al., 1995, Nucleic Acids Res., 23, 2259; Good et al., 1997, Gene Therapy, 4, 45; all of these references are hereby incorporated in their totalities by reference herein). Those skilled in the art realize that any nucleic acid can be expressed in eukaryotic cells from the appropriate DNA/RNA vector. The activity of such nucleic acids can be augmented by their release from the primary transcript by a enzymatic nucleic acid (Draper et al., PCT WO 93/23569, and Sullivan et al., PCT WO 94/02595; Ohkawa et al., 1992, Nucleic Acids Symp. Ser., 27, 15-6; Taira et al., 1991, Nucleic Acids Res., 19, 5125-30; Ventura et al., 1993, Nucleic Acids Res., 21, 3249-55; Chowrira et al., 1994, J. Biol. Chem., 269, 25856; all of these references are hereby incorporated in their totalities by reference herein). Gene therapy approaches specific to the CNS are described by Blesch et al., 2000, Drug News Perspect., 13, 269-280; Peterson et al., 2000, Cent. Nerv. Syst. Dis., 485-508; Peel and Klein, 2000, J. Neurosci. Methods, 98, 95-104; Hagihara et al., 2000, Gene Ther., 7, 759-763; and Herrlinger et al., 2000, Methods Mol. Med., 35, 287-312. AAV-mediated delivery of nucleic acid to cells of the nervous system is further described by Kaplitt et al., U.S. Pat. No. 6,180,613.

[0211] In another aspect of the invention, RNA molecules of the present invention can be expressed from transcription units (see for example Couture et al., 1996, TIG., 12, 510) inserted into DNA or RNA vectors. The recombinant vectors can be DNA plasmids or viral vectors. Ribozyme expressing viral vectors can be constructed based on, but not limited to, adeno-associated virus, retrovirus, adenovirus, or alphavirus. The recombinant vectors capable of expressing the nucleic acid molecules can be delivered as described above, and persist in target cells. Alternatively, viral vectors can be used that provide for transient expression of nucleic acid molecules. Such vectors can be repeatedly administered as necessary. Once expressed, the nucleic acid molecule binds to the target mRNA. Delivery of nucleic acid molecule expressing vectors can be systemic, such as by intravenous or intra-muscular administration, by administration to target cells ex-planted from the patient followed by reintroduction into the patient, or by any other means that would allow for introduction into the desired target cell (for a review see Couture et al., 1996, TIG., 12, 510).

[0212] In one aspect the invention features an expression vector comprising a nucleic acid sequence encoding at least one of the nucleic acid molecules of the instant invention is disclosed. The nucleic acid sequence encoding the nucleic acid molecule of the instant invention is operably linked in a manner that allows expression of that nucleic acid molecule.

[0213] In another aspect the invention features an expression vector comprising: a) a transcription initiation region (e.g., eukaryotic pol I, II or III initiation region); b) a transcription termination region (e.g., eukaryotic pol I, II or III termination region); c) a nucleic acid sequence encoding at least one of the nucleic acid catalyst of the instant invention; and wherein said sequence is operably linked to said initiation region and said termination region, in a manner that allows expression and/or delivery of said nucleic acid molecule. The vector can optionally include an open reading frame (ORF) for a protein operably linked on the 5′ side or the 3′-side of the sequence encoding the nucleic acid catalyst of the invention; and/or an intron (intervening sequences).

[0214] Transcription of the nucleic acid molecule sequences are driven from a promoter for eukaryotic RNA polymerase I (pol I), RNA polymerase II (pol II), or RNA polymerase III (pol III). Transcripts from pol II or pol III promoters are expressed at high levels in all cells; the levels of a given pol II promoter in a given cell type depends on the nature of the gene regulatory sequences (enhancers, silencers, etc.) present nearby. Prokaryotic RNA polymerase promoters are also used, providing that the prokaryotic RNA polymerase enzyme is expressed in the appropriate cells (Elroy-Stein and Moss, 1990, Proc. Natl. Acad. Sci. USA, 87, 6743-7; Gao and Huang 1993, Nucleic Acids Res., 21, 2867-72; Lieber et al., 1993, Methods Enzymol., 217, 47-66; Zhou et al., 1990, Mol. Cell. Biol., 10, 4529-37). All of these references are incorporated by reference herein. Several investigators have demonstrated that nucleic acid molecules, such as ribozymes expressed from such promoters can function in mammalian cells (e.g. Kashani-Sabet et al., 1992, Antisense Res. Dev., 2, 3-15; Ojwang et al., 1992, Proc. Natl. Acad. Sci. USA, 89, 10802-6; Chen et al., 1992, Nucleic Acids Res., 20, 4581-9; Yu et al., 1993, Proc. Natl. Acad. Sci. USA, 90, 6340-4; L'Huillier et al., 1992, EMBO J., 11, 4411-8; Lisziewicz et al., 1993, Proc. Natl. Acad. Sci. U.S.A, 90, 8000-4; Thompson et al., 1995, Nucleic Acids Res., 23, 2259; Sullenger & Cech, 1993, Science, 262, 1566). More specifically, transcription units such as the ones derived from genes encoding U6 small nuclear (snRNA), transfer RNA (tRNA) and adenovirus VA RNA are useful in generating high concentrations of desired RNA molecules such as ribozymes in cells (Thompson et al., supra; Couture and Stinchcomb, 1996, supra; Noonberg et al., 1994, Nucleic Acid Res., 22, 2830; Noonberg et al., U.S. Pat. No. 5,624,803; Good et al., 1997, Gene Ther., 4, 45; Beigelman et al., International PCT Publication No. WO 96/18736; all of these publications are incorporated by reference herein). The above ribozyme transcription units can be incorporated into a variety of vectors for introduction into mammalian cells, including but not restricted to, plasmid DNA vectors, viral DNA vectors (such as adenovirus or adeno-associated virus vectors), or viral RNA vectors (such as retroviral or alphavirus vectors) (for a review see Couture and Stinchcomb, 1996, supra).

[0215] In another aspect the invention features an expression vector comprising a nucleic acid sequence encoding at least one of the nucleic acid molecules of the invention, in a manner that allows expression of that nucleic acid molecule. The expression vector comprises in one embodiment; a) a transcription initiation region; b) a transcription termination region; c) a nucleic acid sequence encoding at least one said nucleic acid molecule; and wherein said sequence is operably linked to said initiation region and said termination region, in a manner that allows expression and/or delivery of said nucleic acid molecule.

[0216] In another embodiment the expression vector comprises: a) a transcription initiation region; b) a transcription termination region; c) an open reading frame; d) a nucleic acid sequence encoding at least one said nucleic acid molecule, wherein said sequence is operably linked to the 3′-end of said open reading frame; and wherein said sequence is operably linked to said initiation region, said open reading frame and said termination region, in a manner that allows expression and/or delivery of said nucleic acid molecule. In yet another embodiment the expression vector comprises: a) a transcription initiation region; b) a transcription termination region; c) an intron; d) a nucleic acid sequence encoding at least one said nucleic acid molecule; and wherein said sequence is operably linked to said initiation region, said intron and said termination region, in a manner which allows expression and/or delivery of said nucleic acid molecule.

[0217] In another embodiment, the expression vector comprises: a) a transcription initiation region; b) a transcription termination region; c) an intron; d) an open reading frame; e) a nucleic acid sequence encoding at least one said nucleic acid molecule, wherein said sequence is operably linked to the 3′-end of said open reading frame; and wherein said sequence is operably linked to said initiation region, said intron, said open reading frame and said termination region, in a manner which allows expression and/or delivery of said nucleic acid molecule.

### EXAMPLES

[0218] The following are non-limiting examples showing the selection, isolation, synthesis and activity of nucleic acids of the instant invention.

### Example 1

### Nucleic Acid Molecules Targeting PTGDS, ADORA1 and PTGDR RNA

[0219] The invention features novel nucleic acid-based molecules, for example, enzymatic nucleic acid molecules, allozymes, antisense nucleic acids, 2-5A antisense chimeras, triplex forming oligonucleotides, decoy RNA, dsRNA, siRNA, aptamers, and antisense nucleic acids containing RNA cleaving chemical groups, and methods to modulate gene expression, for example, genes encoding prostaglandin D2 receptor (PTGDR), prostaglandin D2 synthetase (PTGDS), and adenosine receptors (AR) such as adenosine receptor A1, A2a, A2b, and A3. In particular, the instant invention features nucleic-acid based molecules and methods to modulate the expression of PTGDR, PTGDS, and adenosine A1 receptor (ADORA1).

[0220] In one embodiment, the invention features one or more nucleic acid-based molecules and methods that independently or in combination modulate the expression of gene(s) encoding prostaglandin D2 receptors (PTGDR), prostaglandin D2 synthetase (PTGDS) and adenosine receptors such as ADORA1. Specifically, the present invention features nucleic acid molecules that modulate the expression of prostaglandin D2 receptor (PTGDR) gene, for example Genbank Accession Nos. U31332 and U31099, prostaglandin D2 synthetase (PTGDS) gene, for example Genbank Accession No. NM_{—}000954, and Adenosine A1 receptor (ADORA1), for example Genbank Accession No. NM_{—}000674.

[0221] In another embodiment, the invention features an enzymatic nucleic acid molecule comprising a sequence selected from the group consisting of SEQ ID NOs: 11666-13262. In yet another embodiment, the invention features an enzymatic nucleic acid molecule comprising at least one binding arm wherein one or more of said binding arms comprises a sequence complementary to a sequence selected from the group consisting of SEQ ID NOs: 4415-5483.

[0222] In one embodiment, the invention features an antisense nucleic acid molecule comprising a sequence complementary to a sequence selected from the group consisting of SEQ ID NOs: 4415-5483.

[0223] In another embodiment, an enzymatic nucleic acid molecule, antisense nucleic acid molecule, 2-5A antisense chimera, triplex forming oligonucleotide, decoy RNA, dsRNA, siRNA, aptamer, or antisense nucleic acids containing RNA cleaving chemical groups of the invention is adapted to treat asthma.

[0224] In one embodiment, an enzymatic nucleic acid molecule of the invention has an endonuclease activity to cleave RNA encoded by a PTGDS and/or PTGDR gene.

[0225] In another embodiment, an enzymatic nucleic acid molecule of the invention is in a hammerhead, Inozyme, Zinzyme, DNAzyme, Amberzyme, or G-cleaver configuration.

[0226] In another embodiment, an enzymatic nucleic acid molecule of the invention having a hammerhead configuration comprises a sequence complementary to a sequence having SEQ ID NOs: 4415-4641. In yet another embodiment, an enzymatic nucleic acid molecule of invention having a hammerhead configuration comprises a sequence having SEQ ID NOs: 11666-11892.

[0227] In another embodiment, an enzymatic nucleic acid molecule of the invention having an Inozyme configuration comprises a sequence complementary to a sequence having SEQ ID NOs: 4642-5017. In yet another embodiment, an enzymatic nucleic acid molecule of invention having an Inozyme configuration comprises a sequence having SEQ ID NOs: 11893-12268.

[0228] In another embodiment, an enzymatic nucleic acid molecule of the invention having a Zinzyme configuration comprises a sequence complementary to a sequence having SEQ ID NOs: 5018-5248. In yet another embodiment, an enzymatic nucleic acid molecule of invention having a Zinzyme configuration comprises a sequence having SEQ ID NOs: 12269-12499.

[0229] In another embodiment, an enzymatic nucleic acid molecule of the invention having a DNAzyme configuration comprises a sequence complementary to a sequence having SEQ ID NOs: 4415-5294. In yet another embodiment, an enzymatic nucleic acid molecule of invention having a DNAzyme configuration comprises a sequence having SEQ ID NOs: 12500-12842.

[0230] In another embodiment, an enzymatic nucleic acid molecule of the invention having an Amberzyme configuration comprises a sequence complementary to a sequence having SEQ ID NOs: 5018-5248, and 5295-5483. In yet another embodiment, an enzymatic nucleic acid molecule of invention having an Amberzyme configuration comprises a sequence having SEQ ID NOs: 12843-13262.

[0231] In one embodiment, an enzymatic nucleic acid molecule of the invention comprises between 8 and 100 bases complementary to the RNA of PTGDS, ADORA1 and/or PTGDR gene. In another embodiment, an enzymatic nucleic acid molecule of the invention comprises between 14 and 24 bases complementary to a RNA molecule of a PTGDS or PTGDR gene.

[0232] In one embodiment, an enzymatic nucleic acid molecule, antisense nucleic acid molecule, 2-5A antisense chimera, triplex forming oligonucleotide, decoy RNA, dsRNA, siRNA, aptamer, or antisense nucleic acids containing RNA cleaving chemical groups of the invention is chemically synthesized.

[0233] In another embodiment, an enzymatic nucleic acid molecule, antisense nucleic acid molecule, 2-5A antisense chimera, triplex forming oligonucleotide, decoy RNA, dsRNA, siRNA, aptamer, or antisense nucleic acids containing RNA cleaving chemical groups of the invention comprises at least one 2′-sugar modification.

[0234] In another embodiment, an enzymatic nucleic acid molecule, antisense nucleic acid molecule, 2-5A antisense chimera, triplex forming oligonucleotide, decoy RNA, dsRNA, siRNA, aptamer, or antisense nucleic acids containing RNA cleaving chemical groups of the invention comprises at least one nucleic acid base modification.

[0235] In another embodiment, an enzymatic nucleic acid molecule, antisense nucleic acid molecule, 2-5A antisense chimera, triplex forming oligonucleotide, decoy RNA, dsRNA, siRNA, aptamer, or antisense nucleic acids containing RNA cleaving chemical groups of the invention comprises at least one phosphate backbone modification.

[0236] In one embodiment, the invention features a mammalian cell, for example a human cell, including the enzymatic nucleic acid molecule of the invention.

[0237] In another embodiment, the invention features a method of reducing PTGDS, ADORA1 and/or PTGDR expression or activity in a cell, comprising contacting the cell with an enzymatic nucleic acid molecule of the invention, under conditions suitable for the reduction.

[0238] In another embodiment, the invention features a method of reducing PTGDS, ADORA1 and/or PTGDR expression or activity in a cell, comprising the step of contacting the cell with an antisense nucleic acid molecule of the invention under conditions suitable for the reduction.

[0239] In yet another embodiment, the invention features a method of treatment of a patient having a condition associated with the level of PTGDS, ADORA1 and/or PTGDR, comprising contacting cells of the patient with an enzymatic nucleic acid molecule of the invention, under conditions suitable for the treatment.

[0240] In one embodiment, the invention features a method of treatment of a patient having a condition associated with the level of PTGDS, ADORA1 and/or PTGDR, comprising contacting cells of the patient with an antisense nucleic acid molecule of the invention, under conditions suitable for the treatment.

[0241] In another embodiment, a method of treatment of a patient having a condition associated with the level of PTGDS, ADORA1 and/or PTGDR is featured, wherein the method further comprises the use of one or more drug therapies under conditions suitable for the treatment.

[0242] For example, in one embodiment, the invention features a method for treatment of asthma, allergic rhinitis, or atopic dermatitis under conditions suitable for the treatment.

[0243] In another embodiment, the invention features a method of cleaving a RNA molecule of PTGDS, ADORA1 and/or PTGDR gene comprising contacting an enzymatic nucleic acid molecule of the invention with a RNA molecule of a PTGDS, ADORA1 and/or PTGDR gene under conditions suitable for the cleavage, for example, wherein the cleavage is carried out in the presence of a divalent cation, such as Mg²⁺.

[0244] In one embodiment, an enzymatic nucleic acid molecule of the invention comprises a cap structure, for example a 3′,3′-linked or 5′,5′-linked deoxyabasic ribose derivative, wherein the cap structure is at the 5′-end, or 3′-end, or both the 5′-end and the 3′-end of the enzymatic nucleic acid molecule.

[0245] In another embodiment, an antisense nucleic acid molecule of the invention comprises a cap structure, for example a 3′,3′-linked or 5′,5′-linked deoxyabasic ribose derivative, wherein the cap structure is at the 5′-end, or 3′-end, or both the 5′-end and the 3′-end of the antisense nucleic acid molecule.

[0246] In one embodiment, the invention features an expression vector comprising a nucleic acid sequence encoding at least one enzymatic nucleic acid molecule of the invention, in a manner which allows expression of the nucleic acid molecule.

[0247] In another embodiment, the invention features a mammalian cell, for example, a human cell, including an expression vector of the invention.

[0248] In yet another embodiment, the expression vector of the invention further comprises a sequence for an antisense nucleic acid molecule complementary to a RNA molecule of a PTGDS, ADORA1 and/or PTGDR gene.

[0249] In one embodiment, an expression vector of the invention comprises a nucleic acid sequence encoding two or more enzymatic nucleic acid molecules, which can be the same or different.

[0250] In another embodiment, the invention features a method for treatment of asthma, allergic rhinitis, or atopic dermatitis, comprising administering to a patient an enzymatic nucleic acid molecule, antisense nucleic acid molecule, 2-5A antisense chimera, triplex forming oligonucleotide, decoy RNA, dsRNA, siRNA, aptamer, or antisense nucleic acid containing RNA cleaving chemical groups of the invention, under conditions suitable for the treatment, including administering to the patient one or more other therapies, for example, inhalant anti-inflammatories, bronchodilators, adenosine inhibitors and adenosine A1 receptor inhibitors.

[0251] In one embodiment, the method of treatment features an enzymatic nucleic acid molecule or antisense nucleic acid molecule of the invention comprises at least five ribose residues, at least ten 2′-O-methyl modifications, and a 3′-end modification, such as a 3′-3′ inverted abasic moiety. In another embodiment, an enzymatic nucleic acid molecule or antisense nucleic acid molecule of the invention further comprises phosphorothioate linkages on at least three of the 5′ terminal nucleotides.

[0252] In another embodiment, the invention features a method of administering to a mammal, for example a human, an enzymatic nucleic acid molecule, antisense nucleic acid molecule, 2-5A antisense chimera, triplex forming oligonucleotide, decoy RNA, dsRNA, siRNA, aptamer, or antisense nucleic acid containing RNA cleaving chemical groups of the invention, comprising contacting the mammal with the nucleic acid molecule under conditions suitable for the administration, for example, in the presence of a delivery reagent such as a lipid, cationic lipid, phospholipid, or liposome.

[0253] In yet another embodiment, the invention features a method of administering to a mammal an enzymatic nucleic acid molecule, antisense nucleic acid molecule, 2-5A antisense chimera, triplex forming oligonucleotide, decoy RNA, dsRNA, siRNA, aptamer, or antisense nucleic acid containing RNA cleaving chemical groups of the invention in conjunction with a therapeutic agent, comprising contacting the mammal, for example a human, with the nucleic acid molecule and the therapeutic agent under conditions suitable for the administration.

[0254] In one embodiment, the invention features the use of an enzymatic nucleic acid molecule, which can be in a hammerhead, NCH, G-cleaver, Amberzyme, Zinzyme, and/or DNAzyme motif, to down-regulate the expression of a PTGDS, an ADORA1 and/or a PTGDR gene.

[0255] The enzymatic nucleic acid molecule that cleave the specified sites in PTGDS, ADORA1 and PTGDR-specific RNAs represent a novel therapeutic approach to treat a variety of allergic diseases or conditions, including but not limited to asthma, allergic rhinitis, atopic dermatitis, and/or other allergic or inflammatory diseases and conditions which respond to the modulation of PTGDS, ADORA1 and/or PTGDR expression.

[0256] In one embodiment, a nucleic acid molecule that modulates, for example, down-regulates, PTGDS replication or expression comprises between 8 and 100 bases complementary to a RNA molecule of PTGDS. In another embodiment, a nucleic acid molecule that modulates PTGDS replication or expression comprises between 14 and 24 bases complementary to a RNA molecule of PTGDS.

[0257] In another embodiment, a nucleic acid molecule that modulates, for example, down-regulates, PTGDR replication or expression comprises between 8 and 100 bases complementary to a RNA molecule of PTGDR. In another embodiment, a nucleic acid molecule that modulates PTGDR replication or expression comprises between 14 and 24 bases complementary to a RNA molecule of PTGDR.

[0258] In another embodiment, a nucleic acid molecule that modulates, for example, down-regulates, ADORA1 replication or expression comprises between 8 and 100 bases complementary to a RNA molecule of ADORA1. In another embodiment, a nucleic acid molecule that modulates ADORA1 replication or expression comprises between 14 and 24 bases complementary to a RNA molecule of ADORA1.

[0259] The invention provides a method for producing a class of nucleic acid-based gene modulating agents that exhibit a high degree of specificity for the RNA of a desired target. For example, the enzymatic nucleic acid molecule is can be targeted to a highly conserved sequence region of target RNAs encoding PTGDS, ADORA1 and/or PTGDR (e.g., PTGDS, ADORA1 and/or PTGDR genes) such that specific treatment of a disease or condition can be provided with either one or several nucleic acid molecules of the invention. Such nucleic acid molecules can be delivered exogenously to specific tissue or cellular targets as required. Alternatively, the nucleic acid molecules (e.g., ribozymes and antisense) can be expressed from DNA and/or RNA vectors that are delivered to specific cells.

[0260] Nucleic acid-based inhibitors of PTGDS, ADORA1 and PTGDR expression are useful for the prevention and/or treatment of allergic diseases or conditions, including but not limited to asthma, allergic rhinitis, atopic dermatitis, and any other diseases or conditions that are related to or will respond to the levels of PTGDS, ADORA1 and/or PTGDR in a cell or tissue, alone or in combination with other therapies. The reduction of PTGDS, ADORA1 and/or PTGDR expression (specifically PTGDS, ADORA1 and/or PTGDR gene RNA levels) and thus reduction in the level of the respective protein relieves, to some extent, the symptoms of the disease or condition.

[0261] The nucleic acid molecules of the instant invention, individually, or in combination or in conjunction with other drugs, can be used to treat diseases or conditions discussed above. For example, to treat a disease or condition associated with the levels of PTGDS, ADORA1 and/or PTGDR, the patient can be treated, or other appropriate cells can be treated, as is evident to those skilled in the art, individually or in combination with one or more drugs under conditions suitable for the treatment.

[0262] In a further embodiment, the described molecules, such as antisense or enzymatic nucleic acid molecules, can be used in combination with other known treatments to treat conditions or diseases discussed above. For example, the described molecules can be used in combination with one or more known therapeutic agents to treat allergic diseases or conditions, including but not limited to asthma, allergic rhinitis, atopic dermatitis, and/or other allergic or inflammatory diseases and conditions which respond to the modulation of PTGDS, ADORA1 and/or PTGDR expression.

[0263] In another embodiment, the invention features nucleic acid-based inhibitors (e.g., enzymatic nucleic acid molecules (e.g., ribozymes), antisense nucleic acids, 2-5A antisense chimeras, triplex DNA, antisense nucleic acids containing RNA cleaving chemical groups) and methods for their use to down regulate or inhibit the expression of genes (e.g., PTGDS, ADORA1 and/or PTGDR) capable of progression and/or maintenance allergic diseases or conditions, including but not limited to asthma, allergic rhinitis, atopic dermatitis, and/or other allergic or inflammatory diseases and conditions which respond to the modulation of PTGDS, ADORA1 and/or PTGDR expression.

Identification of Potential Target Sites in Human PTGDS, ADORA1 and PTGDR RNA

[0264] The sequence of human PTGDS, ADORA1 and PTGDR genes are screened for accessible sites using a computer-folding algorithm. Regions of the RNA that do not form secondary folding structures and contained potential enzymatic nucleic acid molecule and/or antisense binding/cleavage sites are identified. The sequences of PTGDR binding/cleavage sites are shown in Tables XIX-XXIII.

Selection of Enzymatic Nucleic Acid Cleavage Sites in Human PTGDS, ADORA1 and PTGDR RNA

[0265] Enzymatic nucleic acid molecule target sites are chosen by analyzing sequences of Human PTGDS (Genbank accession No: NM_{—}000954), ADORA1 (Genbank accession No: NM_{—}000674) and PTGDR gene (Genbank accession Nos: U31332 and U31099) and prioritizing the sites on the basis of folding. Enzymatic nucleic acid molecules are designed that can bind each target and are individually analyzed by computer folding (Christoffersen et al., 1994 J. Mol. Struc. Theochem, 311, 273; Jaeger et al., 1989, Proc. Natl. Acad. Sci. USA, 86, 7706) to assess whether the enzymatic nucleic acid molecule sequences fold into the appropriate secondary structure. Those enzymatic nucleic acid molecules with unfavorable intramolecular interactions between the binding arms and the catalytic core are eliminated from consideration. As noted below, varying binding arm lengths can be chosen to optimize activity. Generally, at least 4 bases on each arm are able to bind to, or otherwise interact with, the target RNA.

Chemical Synthesis and Purification of Ribozymes and Antisense for Efficient Cleavage and/or Blocking of PTGDS, ADORA1 and PTGDR RNA

[0266] Enzymatic nucleic acid molecules and antisense constructs are designed to anneal to various sites in the RNA message. The binding arms of the enzymatic nucleic acid molecules are complementary to the target site sequences described above, while the antisense constructs are fully complementary to the target site sequences described above. The enzymatic nucleic acid molecules and antisense constructs were chemically synthesized. The method of synthesis used followed the procedure for normal RNA synthesis as described above and in Usman et al., (1987 J. Am. Chem. Soc., 109, 7845), Scaringe et al., (1990 Nucleic Acids Res., 18, 5433) and Wincott et al., supra, and made use of common nucleic acid protecting and coupling groups, such as dimethoxytrityl at the 5′-end, and phosphoramidites at the 3′-end. The average stepwise coupling yields were typically ≧98%.

[0267] Enzymatic nucleic acid molecules and antisense constructs are also synthesized from DNA templates using bacteriophage T7 RNA polymerase (Milligan and Uhlenbeck, 1989, Methods Enzymol. 180, 51). Enzymatic nucleic acid molecules and antisense constructs are purified by gel electrophoresis using general methods or are purified by high pressure liquid chromatography (HPLC; See Wincott et al., supra; the totality of which is hereby incorporated herein by reference) and are resuspended in water. The sequences of the chemically synthesized enzymatic nucleic acid molecules used in this study are shown below in Tables XIX-XXIII. The sequences of the chemically synthesized antisense constructs used in this study are complementary sequences to the Substrate sequences shown below as in Tables XIX-XXIII.

Enzymatic Nucleic Acid Molecule Cleavage of PTGDS, ADORA1 and PTGDR RNA Target In Vitro

[0268] Enzymatic nucleic acid molecules targeted to the human PTGDS, ADORA1 and PTGDR RNA are designed and synthesized as described above. These enzymatic nucleic acid molecules can be tested for cleavage activity in vitro, for example, using the following procedure. The target sequences and the nucleotide location within the PTGDR RNA are given in Tables XIX-XXIII.

[0269] Cleavage Reactions: Full-length or partially full-length, internally-labeled target RNA for enzymatic nucleic acid molecule cleavage assay is prepared by in vitro transcription in the presence of [α-³²P] CTP, passed over a G 50 Sephadex column by spin chromatography and used as substrate RNA without further purification. Alternately, substrates are 5′-³²P-end labeled using T4 polynucleotide kinase enzyme. Assays are performed by pre-warming a 2× concentration of purified enzymatic nucleic acid molecule in enzymatic nucleic acid molecule cleavage buffer (50 mM Tris-HCl, pH 7.5 at 37° C., 10 mM MgCl₂) and the cleavage reaction was initiated by adding the 2× enzymatic nucleic acid molecule mix to an equal volume of substrate RNA (maximum of 1-5 nM) that was also pre-warmed in cleavage buffer. As an initial screen, assays are carried out for 1 hour at 37° C. using a final concentration of either 40 nM or 1 mM enzymatic nucleic acid molecule, i.e., enzymatic nucleic acid molecule excess. The reaction is quenched by the addition of an equal volume of 95% formamide, 20 mM EDTA, 0.05% bromophenol blue and 0.05% xylene cyanol after which the sample is heated to 95° C. for 2 minutes, quick chilled and loaded onto a denaturing polyacrylamide gel. Substrate RNA and the specific RNA cleavage products generated by enzymatic nucleic acid molecule cleavage are visualized on an autoradiograph of the gel. The percentage of cleavage is determined by Phosphor Imager® quantitation of bands representing the intact substrate and the cleavage products.

In Vivo Models Used to Evaluate the Down-Regulation of PTGDS, ADORA1 and PTGDR Gene Expression

Animal Models

[0270] Evaluating the efficacy of anti-PTGDS, ADORA-1 and/or PTGDR agents in animal models is an important prerequisite to human clinical trials. Matsuoka et al., 2000, Science, 287, 2012-2016, describe a useful asthma animal model having generating mice deficient in the PTGDR receptor. Sensitization and aerosol challenge of homozygous (PTGDR−/−) mice with ovalbumin was shown to induce increases in the serum concentration of immunoglobin E (IgE), an allergic mediator that activates mast cells, similar to wild-type mice subjected to the same conditions. The concentration of TH2 cytokines and the degree of lymphocyte lung infiltration in the OVA challenged PTGDR −/− mice was shown to be greatly reduced compared to wild type mice. In addition, the PTGDR −/− mice showed only marginal eosinophil infiltration and failed to develop airway hyperreactivity. Similarly, this model can be used to evaluate mice that are treated with nucleic acid molecules of the invention and can furthermore be used as a positive control in determining the response of mice treated with nucleic acid molecules of the invention by using such factors as airway obstruction, lung capacity, and bronchiolar alveolar lavage (BAL) fluid in the evaluation.

Cell Culture

[0271] Two human cell lines, NPE cells and NCB-20 cells are known to express PTGDR. Cloned human PTGDR has been expressed in CHO and COS7 cells and used in various studies. These PTGDR expressing lung cell lines can be used in cell culture assays to evaluate nucleic acid molecules of the invention. A primary endpoint in these experiments would be the RT-PCR analysis of PTGDR mRNA expression in PTGDR expressing cells. In addition, ligand binding assays can be developed where binding of PTGDS can be evaluated in response to treatment with nucleic acid molecules of the invention.

Indications

[0272] The present body of knowledge in PTGDS, ADORA1 and PTGDR research indicates the need for methods to assay PTGDS, ADORA1 and PTGDR activity and for compounds that can regulate PTGDS, ADORA1 and PTGDR expression for research, diagnostic, and therapeutic use. As described herein, the nucleic acid molecules of the present invention can be used in assays to diagnose disease state related of PTGDS, ADORA1 and/or PTGDR levels. In addition, the nucleic acid molecules can be used to treat disease state related to PTGDS, ADORA1 and/or PTGDR levels.

[0273] Particular degenerative and disease states that can be associated with PTGDS, ADORA1 and PTGDR levels include, but are not limited to allergic diseases and conditions, including but not limited to asthma, allergic rhinitis, atopic dermatitis, and any other diseases or conditions that are related to or will respond to the levels of PTGDS, ADORA1 and/or PTGDR in a cell or tissue, alone or in combination with other therapies.

[0274] The use of anti-inflammatories, bronchodilators, adenosine inhibitors and adenosine A1 receptor inhibitors are examples of other treatments or therapies can be combined with the nucleic acid molecules of the invention. Those skilled in the art will recognize that other drug compounds and therapies can be similarly be readily combined with the nucleic acid molecules of the instant invention (e.g. enzymatic nucleic acid molecules and antisense molecules) are hence within the scope of the instant invention.

Diagnostic Uses

[0275] The nucleic acid molecules of this invention (e.g., enzymatic nucleic acid molecules) can be used as diagnostic tools to examine genetic drift and mutations within diseased cells or to detect the presence of PTGDS, ADORA1 and/or PTGDR RNA in a cell. The close relationship between enzymatic nucleic acid molecule activity and the structure of the target RNA allows the detection of mutations in any region of the molecule that alters the base-pairing and three-dimensional structure of the target RNA. By using multiple enzymatic nucleic acid molecules described in this invention, one can map nucleotide changes which are important to RNA structure and function in vitro, as well as in cells and tissues. Cleavage of target RNAs with enzymatic nucleic acid molecules can be used to inhibit gene expression and define the role (essentially) of specified gene products in the progression of disease. In this manner, other genetic targets can be defined as important mediators of the disease. These experiments can lead to better treatment of the disease progression by affording the possibility of combinational therapies (e.g., multiple enzymatic nucleic acid molecules targeted to different genes, enzymatic nucleic acid molecules coupled with known small molecule inhibitors, or intermittent treatment with combinations of enzymatic nucleic acid molecules and/or other chemical or biological molecules). Other in vitro uses of enzymatic nucleic acid molecules of this invention are well known in the art, and include detection of the presence of mRNAs associated with PTGDS, ADORA1 or PTGDR-related condition. Such RNA is detected by determining the presence of a cleavage product after treatment with an enzymatic nucleic acid molecule using standard methodology.

[0276] In a specific example, enzymatic nucleic acid molecules which cleave only wild-type or mutant forms of the target RNA are used for the assay. The first enzymatic nucleic acid molecule is used to identify wild-type RNA present in the sample and the second enzymatic nucleic acid molecule is used to identify mutant RNA in the sample. As reaction controls, synthetic substrates of both wild-type and mutant RNA are cleaved by both enzymatic nucleic acid molecules to demonstrate the relative enzymatic nucleic acid molecule efficiencies in the reactions and the absence of cleavage of the “non-targeted” RNA species. The cleavage products from the synthetic substrates also serve to generate size markers for the analysis of wild-type and mutant RNAs in the sample population. Thus each analysis requires two enzymatic nucleic acid molecules, two substrates and one unknown sample which is combined into six reactions. The presence of cleavage products is determined using an RNAse protection assay so that full-length and cleavage fragments of each RNA can be analyzed in one lane of a polyacrylamide gel. It is not absolutely required to quantify the results to gain insight into the expression of mutant RNAs and putative risk of the desired phenotypic changes in target cells. The expression of mRNA whose protein product is implicated in the development of the phenotype (i.e., PTGDS/PTGDR) is adequate to establish risk. If probes of comparable specific activity are used for both transcripts, then a qualitative comparison of RNA levels will be adequate and will decrease the cost of the initial diagnosis. Higher mutant form to wild-type ratios are correlated with higher risk whether RNA levels are compared qualitatively or quantitatively. The use of enzymatic nucleic acid molecules in diagnostic applications contemplated by the instant invention is described, for example, in George et al., U.S. Pat. Nos. 5,834,186 and 5,741,679, Shih et al., U.S. Pat. No. 5,589,332, Nathan et al., U.S. Pat. No. 5,871,914, Nathan and Ellington, International PCT publication No. WO 00/24931, Breaker et al., International PCT Publication Nos. WO 00/26226 and 98/27104, and Sullenger et al., International PCT publication No. WO 99/29842.

### Example 2

### Nucleic Acid Inhibition of NOGO and NOGO Receptor Target RNA

[0277] The invention features novel nucleic acid-based molecules [e.g., enzymatic nucleic acid molecules (ribozymes), antisense nucleic acids, 2-5A antisense chimeras, triplex DNA, decoy RNA, aptamers, siRNA, antisense nucleic acids containing RNA cleaving chemical groups] and methods to modulate gene expression, for example, genes encoding certain myelin proteins that inhibit or are involved in the inhibition of neurite growth, including axonal regeneration in the CNS. In particular, the instant invention features nucleic-acid based techniques to inhibit the expression of NOGO-A (Accession No. AJ251383), NOGO-B (Accession No. AJ251384), and/or NOGO-C (Accession No. AJ251385), NOGO-66 receptor (Accession No AF283463, Fournier et al., 2001, Nature, 409, 341-346), NI-35, NI-220, and/or NI-250, myelin-associated glycoprotein (Genbank Accession No M29273), tenascin-R (Genbank Accession No X98085), and NG-2 (Genbank Accession No X61945).

[0278] In a preferred embodiment, the invention features the use of one or more of the nucleic acid-based techniques independently or in combination to inhibit the expression or function of the gene(s) encoding NOGO-A, NOGO-B, NOGO-C, NI-35, NI-220, NI-250, myelin-associated glycoprotein, tenascin-R, NG-2 and/or their corresponding receptors. Specifically, the invention features the use of nucleic acid-based techniques to specifically inhibit the expression of NOGO gene (Genbank Accession No. AB020693) and NOGO-66 receptor (Genbank Accession No. AF283463).

[0279] The nucleic acid molecules that interact with NOGO and NOGO receptor-specific RNAs represent a novel therapeutic approach to treat a variety of pathologic indications, including but not limited to CNS injury and cerebrovascular accident (CVA, stroke), Alzheimer's disease, dementia, multiple sclerosis (MS), chemotherapy-induced neuropathy, amyotrophic lateral sclerosis (ALS), Parkinson's disease, ataxia, Huntington's disease, Creutzfeldt-Jakob disease, muscular dystrophy, and/or other neurodegenerative disease states which respond to the modulation of NOGO and NOGO receptor expression.

[0280] In one embodiment, a nucleic acid molecule that inhibits NOGO and/or NOGO receptor replication or expression can comprise between 12 and 100 bases complementary to a RNA molecule of NOGO or NOGO receptor. In another embodiment, a nucleic acid molecule that inhibits NOGO or NOGO receptor replication or expression comprises between 14 and 24 bases complementary to a RNA molecule of NOGO or NOGO receptor.

[0281] In one embodiment the invention provides a method for producing a class of nucleic acid-based gene inhibiting agents which exhibit a high degree of specificity for the RNA of a desired target. For example, the enzymatic nucleic acid molecule is preferably targeted to a highly conserved sequence region of target RNAs encoding NOGO-A, NOGO-B, NOGO-C and/or receptor proteins (specifically NOGO and NOGO receptor genes) such that specific treatment of a disease or condition can be provided with either one or several nucleic acid molecules of the invention. Such nucleic acid molecules can be delivered exogenously to specific tissue or cellular targets as required. Alternatively, the nucleic acid molecules (e.g., ribozymes and antisense) can be expressed from DNA and/or RNA vectors that are delivered to specific cells.

[0282] The nucleic acid-based inhibitors of NOGO and NOGO receptor expression are useful for the prevention and/or treatment of diseases and conditions such CNS injury, cerebrovascular accident (CVA, stroke), Alzheimer's disease, dementia, multiple sclerosis (MS), chemotherapy-induced neuropathy, muscular dystrophy and any other diseases or conditions that are related to or will respond to the levels of NOGO and/or NOGO receptor in a cell or tissue, alone or in combination with other therapies. In addition, NOGO and/or NOGO receptor inhibition can be used as a therapeutic target for abrogating CNS neuronal growth inhibition; a situation that can selectively regenerate damaged or lesioned CNS tissue to restore specific reflex and/or locomotor functions.

[0283] In a further embodiment, the described molecules, such as antisense, siRNA or ribozymes, can be used in combination with other known treatments to treat conditions or diseases discussed above. For example, the described molecules can be used in combination with one or more known therapeutic agents to treat CNS injury, spinal cord injury, cerebrovascular accident (CVA, stroke), Alzheimer's disease, dementia, multiple sclerosis (MS), chemotherapy-induced neuropathy, amyotrophic lateral sclerosis (ALS), Parkinson's disease, ataxia, Huntington's disease, Creutzfeldt-Jakob disease, muscular dystrophy, and/or other neurodegenerative disease states which respond to the modulation of NOGO and/or NOGO receptor expression.

[0284] In another embodiment, the invention features nucleic acid-based inhibitors (e.g., enzymatic nucleic acid molecules (eg; ribozymes), antisense nucleic acids, 2-5A antisense chimeras, triplex DNA, antisense nucleic acids containing RNA cleaving chemical groups) and methods for their use to down regulate or inhibit the expression of genes (e.g., NOGO and/or NOGO receptor) capable of progression and/or maintenance of CNS injury, spinal cord injury, cerebrovascular accident (CVA, stroke), Alzheimer's disease, dementia, multiple sclerosis (MS), chemotherapy-induced neuropathy, amyotrophic lateral sclerosis (ALS), Parkinson's disease, ataxia, Huntington's disease, Creutzfeldt-Jakob disease, muscular dystrophy, and/or other neurodegenerative disease states which respond to the modulation of NOGO and/or NOGO receptor expression.

[0285] The lack of axon regeneration capacity in the adult CNS manifests as a limiting factor in the treatment of CNS injury, cerebrovascular accident (CVA, stroke), chemotherapy-induced neuropathy, and possibly in neurodegenerative diseases such as Alzheimer's disease, dementia, multiple sclerosis (MS), chemotherapy-induced neuropathy, amyotrophic lateral sclerosis (ALS), Parkinson's disease, ataxia, Huntington's disease, Creutzfeldt-Jakob disease, and/or muscular dystrophy. Neuron growth inhibition results from physical barriers imposed by glial scars, a lack of neurotrophic factors, and growth-inhibitory molecules associated with myelin. The abrogation of neurite growth inhibition creates the potential to treat conditions for which there is currently no definitive medical intervention. The inhibition of NOGO (Genbank Accession No AB020693) and NOGO-66 receptor (Genbank Accession No. AF283463) is demonstrated in the following examples.

Identification of Potential Target Sites in Human NOGO RNA

[0286] The sequence of human NOGO and NOGO receptor genes are screened for accessible sites using a computer-folding algorithm. Regions of the RNA that do not form secondary folding structures and contained potential enzymatic nucleic acid molecule and/or antisense binding/cleavage sites are identified. The sequences of these binding/cleavage sites are shown in Tables III-VII.

Selection of Enzymatic Nucleic Acid Cleavage Sites in Human NOGO and NOGO Receptor RNA

[0287] Enzymatic nucleic acid molecule target sites are chosen by analyzing sequences of Human NOGO (Genbank accession No: AB020693) and prioritizing the sites on the basis of folding. Enzymatic nucleic acid molecules are designed that can bind each target and are individually analyzed by computer folding (Christoffersen et al., 1994 J. Mol. Struc. Theochem, 311, 273; Jaeger et al., 1989, Proc. Natl. Acad. Sci. USA, 86, 7706) to assess whether the enzymatic nucleic acid molecule sequences fold into the appropriate secondary structure. Those enzymatic nucleic acid molecules with unfavorable intramolecular interactions between the binding arms and the catalytic core are eliminated from consideration. As noted below, varying binding arm lengths can be chosen to optimize activity. Generally, at least 5 bases on each arm are able to bind to, or otherwise interact with, the target RNA.

Chemical Synthesis and Purification of Ribozymes and Antisense for Efficient Cleavage and/or Blocking of NOGO and NOGO Receptor RNA

[0288] Enzymatic nucleic acid molecules and antisense constructs are designed to anneal to various sites in the RNA message. The binding arms of the enzymatic nucleic acid molecules are complementary to the target site sequences described above, while the antisense constructs are fully complimentary to the target site sequences described above. The enzymatic nucleic acid molecules and antisense constructs were chemically synthesized. The method of synthesis used followed the procedure for normal RNA synthesis as described above and in Usman et al., (1987 J. Am. Chem. Soc., 109, 7845), Scaringe et al., (1990 Nucleic Acids Res., 18, 5433) and Wincott et al., supra, and made use of common nucleic acid protecting and coupling groups, such as dimethoxytrityl at the 5′-end, and phosphoramidites at the 3′-end. The average stepwise coupling yields were typically >98%.

[0289] Enzymatic nucleic acid molecules and antisense constructs are also synthesized from DNA templates using bacteriophage T7 RNA polymerase (Milligan and Uhlenbeck, 1989, Methods Enzymol. 180, 51). Enzymatic nucleic acid molecules and antisense constructs are purified by gel electrophoresis using general methods or are purified by high pressure liquid chromatography (HPLC; See Wincott et al., supra; the totality of which is hereby incorporated herein by reference) and are resuspended in water. The sequences of the chemically synthesized enzymatic nucleic acid molecules used in this study are shown below in Table III-VII. The sequences of the chemically synthesized antisense constructs used in this study are complimentary sequences to the Substrate sequences shown below as in Table III-VII.

Enzymatic Nucleic Acid Molecule Cleavage of NOGO and NOGO Receptor RNA Target In Vitro

[0290] Enzymatic nucleic acid molecules targeted to the human NOGO RNA are designed and synthesized as described above. These enzymatic nucleic acid molecules can be tested for cleavage activity in vitro, for example, using the following procedure. The target sequences and the nucleotide location within the NOGO receptor RNA are given in Tables III-VII.

[0291] Cleavage Reactions: Full-length or partially full-length, internally-labeled target RNA for enzymatic nucleic acid molecule cleavage assay is prepared by in vitro transcription in the presence of [α-³²P] CTP, passed over a G 50 Sephadex column by spin chromatography and used as substrate RNA without further purification. Alternately, substrates are 5′-³²P-end labeled using T4 polynucleotide kinase enzyme. Assays are performed by pre-warming a 2× concentration of purified enzymatic nucleic acid molecule in enzymatic nucleic acid molecule cleavage buffer (50 mM Tris-HCl, pH 7.5 at 37° C., 10 mM MgCl₂) and the cleavage reaction was initiated by adding the 2× enzymatic nucleic acid molecule mix to an equal volume of substrate RNA (maximum of 1-5 nM) that was also pre-warmed in cleavage buffer. As an initial screen, assays are carried out for 1 hour at 37° C. using a final concentration of either 40 nM or 1 mM enzymatic nucleic acid molecule, i.e., enzymatic nucleic acid molecule excess. The reaction is quenched by the addition of an equal volume of 95% formamide, 20 mM EDTA, 0.05% bromophenol blue and 0.05% xylene cyanol after which the sample is heated to 95° C. for 2 minutes, quick chilled and loaded onto a denaturing polyacrylamide gel. Substrate RNA and the specific RNA cleavage products generated by enzymatic nucleic acid molecule cleavage are visualized on an autoradiograph of the gel. The percentage of cleavage is determined by Phosphor Imager® quantitation of bands representing the intact substrate and the cleavage products.

Nucleic Acid Inhibition of NOGO and NOGO Receptor Target RNA In Vivo

[0292] Nucleic acid molecules targeted to the human NOGO and NOGO receptor RNA are designed and synthesized as described above. These nucleic acid molecules can be tested for cleavage activity in vivo, for example using the procedures described below. The target sequences and the nucleotide location within the NOGO receptor RNA are given in Tables III-VII.

Cell Culture

[0293] Spillmann et al., 1998, J. Biol. Chem., 273, 19283-19293, describe the purification and biochemical characterization of a high molecular mass protein of bovine spinal cord myelin (bNI-220) which exerts potent inhibition of neurite outgrowth of NGF-primed PC12 cells and chick DRG cells. This protein can be used to inhibit spreading of 3T3 fibroblasts and to induce collapse of chick DRG growth cones. The monoclonal antibody, mAb IN-1, can be used to fully neutralize the inhibitory activity of bNI-220, which is a presumed NOGO gene product. As such, nucleic acid molecules of the instant invention directed at the inhibition of NOGO expression can be used in place of mAb IN-1 in studying the inhibition of bNI-220 in cell culture experiments described in detail by Spillmann et al., supra. Criteria used in these experiments include the evaluation of spreading behavior of 3T3 fibroblasts, the neurite outgrowth response of PC12 cells, and the growth cone motility of chick DRG growth cones. Similarly, nucleic acid molecules of the instant invention that target NOGO or NOGO receptors can be used to evaluate inhibition of NOGO mediated activity in these cell types using the criteria described above.

[0294] Fournier et al., 2001, Nature, 409, 341 describe a mouse clone of the NOGO-66 receptor which is expressed in non-neuronal COS-7 cells. The transfected COS-7 cell line expresses NOGO-66 receptor protein on the cell surface. An antiserum developed to the NOGO-66 receptor can be used to specifically stain NOGO-66 receptor expressing cells by immunohistochemical staining. As such, an assay for screening nucleic acid-based inhibitors of NOGO-66 receptor expression is provided.

Animal Models

[0295] Bregman et al., 1995, Nature, 378, 498-501 and Z'Graggen et al., 1998, J. Neuroscience, 18, 4744, describe a rat based system for evaluating the role of myelin-associated neurite growth inhibitory proteins in vivo. Young adult Lewis rats receive a mid-thoracic microsurgical spinal cord lesion or a unilateral pyramidotomy. These animals are then treated with mAb IN-1 secreting hybridoma cell explants. A control population receive hybridoma explants which secrete horsreradish peroxidase (HRP) antibodies. Cyclosporin is used during the treatment period to allow hybridoma survival. Additional control rats receive either the spinal cord lesion without any further treatment or no lesion. After a 4-6 week recovery period, behavioral training is followed by the quantitative analysis of reflex and locomotor function. IN-1 treated animals demonstrate growth of corticospinal axons around the lesion site and into the spinal cord which persist past the longest time point of analysis (12 weeks). Furthermore, both reflex and locomotor function, including the functional recovery of fine motor control, is restored in IN-1 treated animals. As such, a robust animal model as described by Bregman et al. supra and Z'Graggen et al., supra, can be used to evaluate nucleic acid molecules of the instant invention when used in place of or in conjunction with mAb IN-1 toward use as modulators of neurite growth inhibitor function (eg. NOGO and NOGO receptor) in vivo.

Indications

[0296] The nucleic acids of the present invention can be used to treat a patient having a condition associated with the level of NOGO or NOGO receptor. One method of treatment comprises contacting cells of a patient with a nucleic acid molecule of the present invention, under conditions suitable for said treatment. Delivery methods and other methods of administration have been discussed herein and are commonly known in the art. Particular degenerative and disease states that can be associated with NOGO and NOGO receptor expression modulation include, but are not limited to, CNS injury, specifically spinal cord injury, cerebrovascular accident (CVA, stroke), Alzheimer's disease, dementia, multiple sclerosis (MS), chemotherapy-induced neuropathy, amyotrophic lateral sclerosis (ALS), Parkinson's disease, ataxia, Huntington's disease, Creutzfeldt-Jakob disease, muscular dystrophy, and/or other neurodegenerative disease states which respond to the modulation of NOGO and NOGO receptor expression.

[0297] The present body of knowledge in NOGO research indicates the need for methods to assay NOGO activity and for compounds that can regulate NOGO expression for research, diagnostic, and therapeutic use.

[0298] Other treatment methods comprise contacting cells of a patient with a nucleic acid molecule of the present invention and further comprise the use of one or more drug therapies under conditions suitable for said treatment. The use of monoclonal antibody (eg; mAb IN-1) treatment, growth factors, antiinflammatory compounds, for example methylprednisolone, calcium blockers, apoptosis inhibiting compounds, for example GM-1 ganglioside, and physical therapies, for example treadmill therapy, are all non-limiting examples of methods that can be combined with or used in conjunction with the nucleic acid molecules (e.g. ribozymes and antisense molecules) of the instant invention. Those skilled in the art will recognize that other drug compounds and therapies can be similarly be readily combined with the nucleic acid molecules of the instant invention (e.g. ribozymes and antisense molecules) are hence within the scope of the instant invention.

Diagnostic Uses

[0299] The nucleic acid molecules of this invention (e.g., enzymatic nucleic acid molecules) can be used as diagnostic tools to examine genetic drift and mutations within diseased cells or to detect the presence of NOGO and/or NOGO receptor RNA in a cell. The close relationship between enzymatic nucleic acid molecule activity and the structure of the target RNA allows the detection of mutations in any region of the molecule which alters the base-pairing and three-dimensional structure of the target RNA. By using multiple enzymatic nucleic acid molecules described in this invention, one can map nucleotide changes which are important to RNA structure and function in vitro, as well as in cells and tissues. Cleavage of target RNAs with enzymatic nucleic acid molecules can be used to inhibit gene expression and define the role (essentially) of specified gene products in the progression of disease. In this manner, other genetic targets can be defined as important mediators of the disease. These experiments can lead to better treatment of the disease progression by affording the possibility of combinational therapies (e.g., multiple enzymatic nucleic acid molecules targeted to different genes, enzymatic nucleic acid molecules coupled with known small molecule inhibitors, or intermittent treatment with combinations of enzymatic nucleic acid molecules and/or other chemical or biological molecules). Other in vitro uses of enzymatic nucleic acid molecules of this invention are well known in the art, and include detection of the presence of mRNAs associated with NOGO-related condition. Such RNA is detected by determining the presence of a cleavage product after treatment with a enzymatic nucleic acid molecule using standard methodology.

[0300] In a specific example, enzymatic nucleic acid molecules which cleave only wild-type or mutant forms of the target RNA are used for the assay. The first enzymatic nucleic acid molecule is used to identify wild-type RNA present in the sample and the second enzymatic nucleic acid molecule is used to identify mutant RNA in the sample. As reaction controls, synthetic substrates of both wild-type and mutant RNA are cleaved by both enzymatic nucleic acid molecules to demonstrate the relative enzymatic nucleic acid molecule efficiencies in the reactions and the absence of cleavage of the “non-targeted” RNA species. The cleavage products from the synthetic substrates also serve to generate size markers for the analysis of wild-type and mutant RNAs in the sample population. Thus each analysis requires two enzymatic nucleic acid molecules, two substrates and one unknown sample which is combined into six reactions. The presence of cleavage products is determined using an RNAse protection assay so that full-length and cleavage fragments of each RNA can be analyzed in one lane of a polyacrylamide gel. It is not absolutely required to quantify the results to gain insight into the expression of mutant RNAs and putative risk of the desired phenotypic changes in target cells. The expression of mRNA whose protein product is implicated in the development of the phenotype (i.e., NOGO) is adequate to establish risk. If probes of comparable specific activity are used for both transcripts, then a qualitative comparison of RNA levels will be adequate and will decrease the cost of the initial diagnosis. Higher mutant form to wild-type ratios are correlated with higher risk whether RNA levels are compared qualitatively or quantitatively. The use of enzymatic nucleic acid molecules in diagnostic applications contemplated by the instant invention is more fully described in George et al., U.S. Pat. Nos. 5,834,186 and 5,741,679, Shih et al., U.S. Pat. No. 5,589,332, Nathan et al., U.S. Pat. No. 5,871,914, Nathan and Ellington, International PCT publication No. WO 00/24931, and Sullenger et al., International PCT publication No. WO 99/29842.

### Example 3

### Nucleic Acid Inhibition of IKK-Gamma and PKR Target RNA

[0301] The invention features nucleic acid molecules, for example enzymatic nucleic acid molecules, antisense nucleic acid molecules, 2,5-A chimeras, decoys, siRNA, triplex oligonucleotides, siRNA and/or aptamers, and methods to modulate gene expression, for example, genes encoding a member of the IκB kinase IKK complex, such as IKK-alpha (IKK1), IKK-beta (IKK2), or IKK-gamma (IKKγ) and/or a protein kinase PKR protein. In particular, the instant invention features nucleic-acid based molecules and methods to modulate the expression of IKK-gamma (IKKγ) and protein kinase PKR.

[0302] The invention features one or more nucleic acid-based molecules and methods that independently or in combination modulate the expression of gene(s) encoding a member of the IκB kinase IKK complex or PKR. In particular embodiments, the invention features nucleic acid-based molecules and methods that modulate the expression of a member of the IκB kinase IKK complex, for example IKK-alpha (IKK1), IKK-beta (IKK2), or IKK-gamma (IKKγ) and/or a protein kinase PKR protein, such as IKK-alpha (IKK1) gene (Genbank Accession No. NM_{—}001278); IKK-beta (IKK2) gene, for example (Genbank Accession No. AF080158), IKK-gamma (IKKγ) gene, for example (Genbank Accession No. NM_{—}003639), and protein kinase PKR gene, for example (Genbank Accession No. NM_{—}002759).

[0303] In one embodiment, an enzymatic nucleic acid molecule of the invention comprises a sequence selected from the group consisting of SEQ ID NOs. 7056-7249.

[0304] In another embodiment, an enzymatic nucleic acid molecule of the invention comprises at least one binding arm wherein one or more of said binding arms comprises a sequence complementary to a sequence selected from the group consisting of SEQ ID NOs. 1024-4414.

[0305] In another embodiment, an antisense nucleic acid molecule or siRNA molecule of the invention comprises a sequence complementary to a sequence selected from the group consisting of SEQ ID NOs. 1024-4414.

[0306] In another embodiment, an nucleic acid molecule of the invention is adapted to treat cancer. In yet another embodiment, an enzymatic nucleic acid molecule of the invention has an endonuclease activity to cleave RNA having IKK-gamma or PKR sequence.

[0307] In one embodiment, an enzymatic nucleic acid molecule of the invention is in an Inozyme, Zinzyme, G-cleaver, Amberzyme, DNAzyme, or Hammerhead configuration.

[0308] In another embodiment, an Inozyme of the invention comprises a sequence complementary to a sequence selected from the group consisting of SEQ ID NOs. 1218-1721 and 3051-3549.

[0309] In another embodiment, an Inozyme of the invention comprises a sequence selected from the group consisting of SEQ ID NOs. 7250-7753 and 9701-10199.

[0310] In another embodiment, a Zinzyme of the invention comprises a sequence complementary to a sequence selected from the group consisting of SEQ ID NOs. 1722-1998 and 3550-3768.

[0311] In another embodiment, a Zinzyme of the invention comprises a sequence selected from the group consisting of SEQ ID NOs 7754-8030 and 10200-10418.

[0312] In another embodiment, an Amberzyme of the invention comprises a sequence selected from the group consisting of SEQ ID NOs 8441-9069 and 11001-11547.

[0313] In another embodiment, a DNAzyme of the invention comprises a sequence selected from the group consisting of SEQ ID NOs 8031-8440 and 10419-11000.

[0314] In another embodiment, a Hammerhead of the invention comprises a sequence complementary to a sequence selected from the group consisting of SEQ ID NOs. 1024-1217 and 2420-3050.

[0315] In another embodiment, a Hammerhead of the invention comprises a sequence selected from the group consisting of SEQ ID NOs 7056-7249 and 9070-9700.

[0316] In one embodiment, a nucleic acid molecule of the invention comprises between 12 and 100 bases complementary to RNA having sequence of IKK-gamma or PKR. In another embodiment, a nucleic acid molecule of the invention comprises between 14 and 24 bases complementary to RNA having sequence of IKK-gamma or PKR.

[0317] In yet another embodiment, a nucleic acid molecule of the invention is chemically synthesized.

[0318] In another embodiment, a nucleic acid molecule or antisense nucleic acid molecule of the invention comprises at least one 2′-sugar modification, at least one nucleic acid base modification, or at least one phosphate backbone modification.

[0319] In one embodiment, the invention features a mammalian cell, for example a human cell, including an enzymatic nucleic acid molecule of the invention.

[0320] The present invention features method of down-regulating PKR activity in a cell, comprising contacting the cell with a nucleic acid molecule of the invention, under conditions suitable for down-regulating of PKR activity.

[0321] The present invention also features method of treatment of a patient having a condition associated with the level of PKR, comprising contacting cells of the patient with a nucleic acid molecule of the invention under conditions suitable for the treatment.

[0322] The present invention features method of down-regulating IKK-gamma activity in a cell, comprising contacting the cell with a nucleic acid molecule of the invention, under conditions suitable for down-regulating of IKK-gamma activity.

[0323] The present invention also features method of treatment of a patient having a condition associated with the level of IKK-gamma, comprising contacting cells of the patient with the nucleic acid molecule of the invention, under conditions suitable for the treatment.

[0324] In one embodiment, a method of treatment of the invention comprises the use of one or more drug therapies under conditions suitable for said treatment.

[0325] The present invention features method of cleaving RNA comprising a sequence of PKR gene comprising contacting an enzymatic nucleic acid molecule of the invention with the RNA of a PKR gene under conditions suitable for the cleavage.

[0326] The present invention also features method of cleaving RNA comprising a sequence of IKK-gamma gene comprising contacting an enzymatic nucleic acid molecule of the invention with the RNA of an IKK-gamma gene under conditions suitable for the cleavage.

[0327] In one embodiment, a method of cleavage of the invention is carried out in the presence of a divalent cation, for example Mg2+.

[0328] In another embodiment, a nucleic acid molecule of the invention comprises a cap structure, wherein the cap structure is at the 5′-end, or 3′-end, or both the 5′-end and the 3′-end, for example a 3′,3′-linked or 5′,5′-linked deoxyabasic derivative.

[0329] The present invention also features an expression vector comprising a nucleic acid sequence encoding at least one nucleic acid molecule the invention in a manner which allows expression of the nucleic acid molecule.

[0330] In one embodiment, the invention features a mammalian cell, for example a human cell, including an expression vector contemplated by the invention.

[0331] In another embodiment, an expression vector of the invention further comprises a sequence for a nucleic acid molecule complementary to the RNA of a subunit of IKK-gamma or PKR.

[0332] In yet another embodiment, an expression vector of the invention comprises a nucleic acid sequence encoding two or more nucleic acid molecules, which can be the same or different.

[0333] The present invention also features a method for treatment of cancer, for example breast cancer, lung cancer, prostate cancer, colorectal cancer, brain cancer, esophageal cancer, stomach cancer, bladder cancer, pancreatic cancer, cervical cancer, head and neck cancer, ovarian cancer, melanoma, lymphoma, glioma, or multidrug resistant cancer, comprising administering to a patient a nucleic acid molecule of the invention under conditions suitable for said treatment.

[0334] In one embodiment, a nucleic acid molecule of the invention comprises at least five ribose residues, at least ten 2′-O-methyl modifications, and a 3′-end modification such as a 3′-3′ inverted abasic moiety, and/or phosphorothioate linkages on at least three of the 5′ terminal nucleotides.

[0335] In another embodiment, other drug therapies contemplated by the invention include monoclonal antibodies, IKK-gamma or PKR-specific inhibitors, chemotherapy, or radiation therapy.

[0336] Specific chemotherapy contemplated by the invention include paclitaxel, docetaxel, cisplatin, methotrexate, cyclophosphamide, doxorubin, fluorouracil carboplatin, edatrexate, gemcitabine, or vinorelbine.

[0337] The invention also features a method for treatment of an inflammatory disease, for example rheumatoid arthritis, restenosis, asthma, Crohn's disease, diabetes, obesity, autoimmune disease, lupus, multiple sclerosis, transplant/graft rejection, gene therapy applications, ischemia/reperfusion injury, glomerulonephritis, sepsis, allergic airway inflammation, inflammatory bowel disease, or infection, comprising the step of administering to a patient a nucleic acid molecule of the invention under conditions suitable for the treatment.

[0338] The present invention features pharmaceutical compositions comprising the nucleic acid molecules of the invention in a pharmaceutically acceptable carrier.

[0339] The invention also features a method of administering to a cell, such as mammalian cell (e.g. human cell), where the cell can be in culture or in a mammal, such as a human, an enzymatic nucleic acid molecule or antisense molecule of the instant invention, comprising contacting the cell with the nucleic acid molecule under conditions suitable for such administration. The method of administration can be in the presence of a delivery reagent, for example a lipid, cationic lipid, phospholipid, or liposome.

[0340] The nucleic acid molecules that target specific sites in IKK-gamma or PKR-specific RNAs represent a therapeutic approach to treat a variety of inflammatory-related diseases and conditions, including but not limited to rheumatoid arthritis, restenosis, asthma, Crohn's disease, incontinentia pigmenti, diabetes, obesity, autoimmune disease, lupus, multiple sclerosis, transplant/graft rejection, gene therapy applications, ischemia/reperfusion injury (CNS and myocardial), glomerulonephritis, sepsis, allergic airway inflammation, inflammatory bowel disease, infection, and any other inflammatory disease or condition which respond to the modulation of IKK-gamma or PKR function.

[0341] The enzymatic nucleic acid molecules that cleave the specified sites in IKK-gamma or PKR-specific RNAs also represent a therapeutic approach to treat a variety of cancers, including but not limited to breast, lung, prostate, colorectal, brain, esophageal, bladder, pancreatic, cervical, head and neck, and ovarian cancer, melanoma, lymphoma, glioma, multidrug resistant cancers, and/or other cancers which respond to the modulation of IKK-gamma or PKR function.

[0342] In one embodiment, a nucleic acid molecule that modulates, for example, down-regulates IKK-gamma or PKR expression comprises between 12 and 100 bases complementary to a RNA molecule of IKK-gamma or PKR. In another embodiment, a nucleic acid molecule that modulates, for example IKK-gamma or PKR expression comprises between 14 and 24 bases complementary to a RNA molecule of IKK-gamma or PKR.

[0343] Nucleic acid-based inhibitors of IKK-gamma or PKR function are useful for the prevention and/or treatment of cancers and cancerous conditions such as breast, lung, prostate, colorectal, brain, esophageal, bladder, pancreatic, cervical, head and neck, and ovarian cancer, melanoma, lymphoma, glioma, multidrug resistant cancers, and any other diseases or conditions that are related to or will respond to the levels of IKK-gamma or PKR in a cell or tissue, alone or in combination with other therapies.

[0344] Nucleic acid-based inhibitors of IKK-gamma or PKR function are also useful for the prevention and/or treatment of inflammatory related diseases and conditions, including but not limited to rheumatoid arthritis, restenosis, asthma, Crohn's disease, incontinentia pigmenti, diabetes, obesity, autoimmune disease, lupus, multiple sclerosis, transplant/graft rejection, gene therapy applications, ischemia/reperfusion injury (CNS and myocardial), glomerulonephritis, sepsis, allergic airway inflammation, inflammatory bowel disease, infection, and any other inflammatory disease or condition which respond to the modulation of IKK-gamma or PKR function.

[0345] In a further embodiment, the described nucleic acid molecules, such as antisense, siRNA or enzymatic nucleic acid molecules, can be used in combination with other known treatments to treat conditions or diseases discussed above. For example, the described molecules can be used in combination with one or more known therapeutic agents to treat breast, lung, prostate, colorectal, brain, esophageal, bladder, pancreatic, cervical, head and neck, and ovarian cancer, melanoma, lymphoma, glioma, multidrug resistant cancers, rheumatoid arthritis, restenosis, asthma, Crohn's disease, diabetes, incontinentia pigmenti, obesity, autoimmune disease, lupus, multiple sclerosis, transplant/graft rejection, gene therapy applications, ischemia/reperfusion injury (CNS and myocardial), glomerulonephritis, sepsis, allergic airway inflammation, inflammatory bowel disease, infection, and any other cancerous disease or inflammatory disease or condition which respond to the modulation of IKK-gamma or PKR expression.

Identification of Potential Target Sites in Human IKK-Gamma and PKR RNA

[0346] The sequence of human IKK-gamma or PKR genes are screened for accessible sites using a computer-folding algorithm. Regions of the RNA that do not form secondary folding structures and contained potential enzymatic nucleic acid molecule and/or antisense binding/cleavage sites are identified. The sequences of these binding/cleavage sites are shown in Tables VIII-XVIII.

Selection of Enzymatic Nucleic Acid Cleavage Sites in Human IKK-Gamma and PKR RNA

[0347] Enzymatic nucleic acid molecule target sites are chosen by analyzing sequences of Human IKK-gamma (Genbank accession No: NM_{—}003639) and PKR (Genbank accession No: NM_{—}002759) and prioritizing the sites on the basis of folding. Enzymatic nucleic acid molecules are designed that can bind each target and are individually analyzed by computer folding (Christoffersen et al., 1994 J. Mol. Struc. Theochem, 311, 273; Jaeger et al., 1989, Proc. Natl. Acad. Sci. USA, 86, 7706) to assess whether the enzymatic nucleic acid molecule sequences fold into the appropriate secondary structure. Those enzymatic nucleic acid molecules with unfavorable intramolecular interactions between the binding arms and the catalytic core are eliminated from consideration. As noted below, varying binding arm lengths can be chosen to optimize activity. Generally, at least 5 bases on each arm are able to bind to, or otherwise interact with, the target RNA.

Chemical Synthesis and Purification of Ribozymes and Antisense for Efficient Cleavage and/or Blocking of IKK-Gamma and PKR RNA

[0348] Enzymatic nucleic acid molecules and antisense constructs are designed to anneal to various sites in the RNA message. The binding arms of the enzymatic nucleic acid molecules are complementary to the target site sequences described above, while the antisense constructs are fully complementary to the target site sequences described above. The enzymatic nucleic acid molecules and antisense constructs were chemically synthesized. The method of synthesis used followed the procedure for normal RNA synthesis as described above and in Usman et al., (1987 J. Am. Chem. Soc., 109, 7845), Scaringe et al., (1990 Nucleic Acids Res., 18, 5433) and Wincott et al., supra, and made use of common nucleic acid protecting and coupling groups, such as dimethoxytrityl at the 5′-end, and phosphoramidites at the 3′-end. The average stepwise coupling yields were typically >98%.

[0349] Enzymatic nucleic acid molecules and antisense constructs are also synthesized from DNA templates using bacteriophage T7 RNA polymerase (Milligan and Uhlenbeck, 1989, Methods Enzymol. 180, 51). Enzymatic nucleic acid molecules and antisense constructs are purified by gel electrophoresis using general methods or are purified by high pressure liquid chromatography (HPLC; See Wincott et al., supra; the totality of which is hereby incorporated herein by reference) and are resuspended in water. The sequences of the chemically synthesized enzymatic nucleic acid molecules used in this study are shown below in Table XVIII. The sequences of the chemically synthesized antisense constructs used in this study are complementary sequences to the Substrate sequences shown below as in Tables VIII-XVIII.

Enzymatic Nucleic Acid Molecule Cleavage of IKK-Gamma and PKR RNA Target In Vitro

[0350] Enzymatic nucleic acid molecules targeted to the human IKK-gamma or PKR RNA are designed and synthesized as described above. These enzymatic nucleic acid molecules can be tested for cleavage activity in vitro, for example, using the following procedure. The target sequences and the nucleotide location within the IKK-gamma or PKR RNA are given in Tables VIII-XVIII.

[0351] Cleavage Reactions: Full-length or partially full-length, internally-labeled target RNA for enzymatic nucleic acid molecule cleavage assay is prepared by in vitro transcription in the presence of [a-³²P] CTP, passed over a G 50 Sephadex column by spin chromatography and used as substrate RNA without further purification. Alternately, substrates are 5′-³²P-end labeled using T4 polynucleotide kinase enzyme. Assays are performed by pre-warming a 2× concentration of purified enzymatic nucleic acid molecule in enzymatic nucleic acid molecule cleavage buffer (50 mM Tris-HCl, pH 7.5 at 37° C., 10 mM MgCl₂) and the cleavage reaction was initiated by adding the 2× enzymatic nucleic acid molecule mix to an equal volume of substrate RNA (maximum of 1-5 nM) that was also pre-warmed in cleavage buffer. As an initial screen, assays are carried out for 1 hour at 37° C. using a final concentration of either 40 nM or 1 mM enzymatic nucleic acid molecule, i.e., enzymatic nucleic acid molecule excess. The reaction is quenched by the addition of an equal volume of 95% formamide, 20 mM EDTA, 0.05% bromophenol blue and 0.05% xylene cyanol after which the sample is heated to 95° C. for 2 minutes, quick chilled and loaded onto a denaturing polyacrylamide gel. Substrate RNA and the specific RNA cleavage products generated by enzymatic nucleic acid molecule cleavage are visualized on an autoradiograph of the gel. The percentage of cleavage is determined by Phosphor Imager® quantitation of bands representing the intact substrate and the cleavage products.

Nucleic Acid Down-Regulation of IKK-Gamma and PKR Target RNA In Vivo

[0352] Nucleic acid molecules targeted to the human IKK-gamma or PKR RNA are designed and synthesized as described above. These nucleic acid molecules can be tested for cleavage activity in vivo, for example using the procedures described below. The target sequences and the nucleotide location within the IKK-gamma or PKR RNA are given in Tables VIII-XVIII.

In Vivo Models Used to Evaluate the Down-Regulation of IKK-Gamma or PKR Gene Expression

[0353] A variety of endpoints have been used in cell culture models to evaluate IKK-gamma or PKR-mediated effects after treatment with anti-IKK-gamma or PKR agents. Phenotypic endpoints include inhibition of cell proliferation, apoptosis assays and reduction of IKK-gamma or PKR protein expression, or a decrease in NFKB expression. Since IKK-gamma and PKR are both involved in the induction of NFKB, NFKB can be used as a surrogate marker in cell culture, animal, and clinical studies. Because overexpression of NFKB is directly associated with increased proliferation of tumor cells, a proliferation endpoint for cell culture assays is preferably used as a primary screen. There are several methods by which this endpoint can be measured. Following treatment of cells with nucleic acid molecules, cells are allowed to grow (typically 5 days) after which either the cell viability, the incorporation of [³H]thymidine into cellular DNA and/or the cell density can be measured. The assay of cell density is very straightforward and can be performed in a 96-well format using commercially available fluorescent nucleic acid stains (such as Syto® 13 or CyQuant®). The assay using CyQuant® is described herein

[0354] As a secondary, confirmatory endpoint a nucleic acid-mediated decrease in the level of IKK-gamma or PKR RNA and/or IKK-gamma or PKR protein expression can be evaluated. Alternately, a decrease in the level of NFKB RNA can be evaluated.

Cell Culture

[0355] Cell types that express/over-express NFKB include HeLa, macrophages, peripheral blood lymphocytes, hepatocytes, fibroblasts, endothelial cells and epithelial cells. In culture, these cells can be stimulated to express/over-express NFKB by addition of TNF-alpha PMA or IL-1-beta to the culture medium. Some of these cell types also can respond with a similar activation of NFKB following LPS treatment. Activation of NFKB in cultured cells can be evaluated by electrophoretic mobility shift assay (EMSA). Delineation of alterations in the subunits can be determined by Western blot.

Primary Screen

[0356] A useful cell culture system in evaluating NFKB modulation is human colonic epithelial cells. One suitable cell line is SW620 colon carcinoma cells (CCL227). These cells respond to stimulation with TNF-alpha, LPS and/or IL-1-beta with an increase in NFKB activation. SW620 cells are grown in MEM supplemented with 10% heat-inactivated FBS and glutamine (2 mmol/L).

[0357] TNF-alpha dose-response curves in these cells are determined by incubating cells with various concentrations of recombinant human TNF-alpha (Sigma Chemical Co.). Maximal DNA binding activity induction can occur with 150 U/ml TNF-alpha in the culture medium. Induction is typically evident within 10 minutes of treatment with TNF-alpha reaches a peak at one hour post-treatment and persists for up to 4 hours post-treatment. The primary readout can be NFKB DNA activity in nuclear extracts of SW620 cells as determined by electrophoretic mobility shift assays (EMSA). Once the appropriate TNF-alpha dose/response profile has been determined, inhibition of IKK-gamma, PKR, or NFKB activation is evaluated using specific and non-specific inhibitors of activation, sulfasalazine and steroids, respectively. Cells are incubated with inhibitors or control media for 30 minutes prior to stimulation with TNF-alpha Nuclear extracts are prepared and evaluated for DNA binding activity by EMSA. Once the activity of positive controls has been established, enzymatic nucleic acids targeting the IKK-gamma or PKR are evaluated in this system. Supershift assays using polyclonal antibodies against the NFKB or PKR protein subunits can be performed to confirm down-regulation of NFKB.

Secondary Screens

[0358] SW620 cells can be transfected with the 3xIg-kappa-B-Luc reporter construct 18 hours before challenge with TNF-alpha, LPS or PMA. The readout for this assay is luciferase activity. Test compounds are applied 17.5 hours after transfection (30 minutes before challenge). Cells are harvested 24 hours after challenge and relative changes in luciferase activity is used as the endpoint. Lastly, the activation of NFKB can be visualized fluorescently. Inactive NFKB heterodimers are held in the cytoplasm by inhibitory proteins. Once activated, the free heterodimers translocate to the nucleus. Thus, the relative change in cytoplasmic versus nuclear fluorescence can indicate the degree of NFKB activation. Cells can be grown on chamber slides, treated with TNF-alpha with and without test compounds), and the location of the NFKB subunit can be determined by immunofluorescence using a FITC-labeled antibody to NFKB.

Animal Models

[0359] Evaluating the efficacy of anti-IKK-gamma or PKR agents in animal models is an important prerequisite to human clinical trials. Studies have shown that human breast carcinoma cell lines express high levels of NFKB (Sovak et al., 1997, J. Clin. Invest., 100, 2952-2960). High levels of NFKB have also been observed in carcinogen-induced primary rat mammary tumors and in human breast cancer specimins. Additionally, HER2/neu overexpression has been shown to activate NFKB (Pianetti et al., 2001, Oncogene, 20, 1287-1299). As such, xenografts of cell lines that over-express NFKB can be used in animal models of tumorigenesis and/or inflammation to study the inhibition of NFKB.

Oncology Animal Model Development

[0360] Tumor cell lines are characterized to establish their growth curves in mice. These cell lines are implanted into both nude and SCID mice and primary tumor volumes are measured 3 times per week. Growth characteristics of these tumor lines using a Matrigel implantation format can also be established. The use of other cell lines that have been engineered to express high levels of NFKB can also be used in the described studies. The tumor cell line(s) and implantation method that supports the most consistent and reliable tumor growth is used in animal studies testing the lead IKK-gamma or PKR nucleic acid(s). Nucleic acids are administered by daily subcutaneous injection or by continuous subcutaneous infusion from Alzet mini osmotic pumps beginning 3 days after tumor implantation and continuing for the duration of the study. Group sizes of at least 10 animals are employed. Efficacy is determined by statistical comparison of tumor volume of nucleic acid-treated animals to a control group of animals treated with saline alone. Because the growth of these tumors is generally slow (45-60 days), an initial endpoint is the time in days it takes to establish an easily measurable primary tumor (i.e. 50-100 mm³) in the presence or absence of nucleic acid treatment.

Inflammation Animal Model Development

[0361] Chronic, sublethal administration of indomethacin to outbred rats produces an enteropathy characterized by thickening of the small intestine and mesentery, ulcerations, granulomatous inflammation, crypt abcesses and adhesions. These lesions are similar to those that are characteristic findings in human patients with Crohn's disease (CD). Thus, any beneficial therapeutic effects revealed using this model can be extrapolated to potential benefit for patients with CD.

[0362] Male Sprague-Dawley rats (200-275 g) are utilized for these studies. Chronic intestinal inflammation is induced by two subcutaneous injections of indomethacin (7.5 mg/kg in 5% NaHCO3) administered on subsequent days (Day-0 and Day-1). Animals are followed for four days following the first indomethacin injection. The mortality rate associated with this model is typically less than 10%. On the last day of the study, animals are euthanized by CO₂ asphyxiation, small intestines excised and gross pathologic findings ranked according to the following criteria: 0, normal; 1, minimal abnormalities, slight thickening of the small intestine, no adhesions; 2, obvious thickening of small intestine with 1 adhesion; 3, obvious thickening of small intestine with 2 or 3 adhesions; 4, massive adhesions to the extent that the intestine cannot be separated, contents primarily fluid; 5, severe peritonitis resulting in death. A 10-cm portion of the most affected region of the small intestine is weighed, placed in 10% neutral buffered formalin and submitted for histopathologic evaluation.

[0363] The 10 cm portion of gut from each animal is cut into five equal sections. Transverse and longitudinal sections of each portion are cut and stained with hematoxylin and eosin. All slides are read in a blinded fashion and each section is scored for necrosis (% area of involvement) and inflammatory response according to the following scale:
[0364] Necrosis—1, 10%; 2, 10-25%; 3, 25-50%; 4, 50-75%; 5, 75-100%;
[0365] Inflammation—
[0366] 1=minimal in mesentery and muscle or lesion
   [0367] 2=mild in mesentery and muscle or lesion
   [0368] 3=moderate in mesentery and muscle or lesion
   [0369] 4=marked in lesion
   [0370] 5=severe in lesion

[0371] The scores for each of the five sections are averaged for necrosis and for inflammation.

NFKB Levels for Patient Screening and as a Potential Endpoint

[0372] Because elevated NFKB levels can be detected in cancers, cancer patients can be pre-screened for elevated NFKB prior to admission to initial clinical trials testing an anti-IKK-gamma or PKR nucleic acid. Initial NFKB levels can be determined (by ELISA) from tumor biopsies or resected tumor samples. During clinical trials, it can be possible to monitor circulating NFKB protein by ELISA. Evaluation of serial blood/serum samples over the course of the anti-IKK-gamma or PKR nucleic acid treatment period could be useful in determining early indications of efficacy.

Activity of Nucleic Acid Molecules Used to Down-Regulate IKK-Gamma and PKR Gene Expression

[0373] Applicant has designed and synthesized several nucleic acid molecules targeted against IKK-gamma or PKR RNA. These nucleic acid molecules can be tested in cell proliferation and RNA reduction assays described herein.

Proliferation Assay

[0374] A model proliferation assay can be done using a cell-plating density of 2,000 cells/well in 96-well plates and at least 2 cell doublings over a 5-day treatment period. Cells used in proliferation studies can be, for example, were either lung or ovarian cancer cells (A549 and SKOV-3 cells respectively). To calculate cell density for proliferation assays, the FIPS (fluoro-imaging processing system) method known in the art can be used. This method allows for cell density measurements after nucleic acids are stained with CyQuant® dye, and has the advantage of accurately measuring cell densities over a very wide range 1,000-100,000 cells/well in 96-well format. Enzymatic nucleic acid molecules (50-200 nM) are delivered in the presence of cationic lipid at 2.5-5.0 μg/mL and inhibition of proliferation can be determined on day 5 post-treatment.

RNA Assay

[0375] RNA is harvested 24 hours post-treatment using the Qiagen RNeasy® 96 procedure. Real time RT-PCR (TaqMan® assay) is performed on purified RNA samples using separate primer/probe sets specific for target IKK-gamma or PKR RNA.

Indications

[0376] Particular degenerative and disease states that can be associated with IKK-gamma or PKR expression modulation include but are not limited to cancerous and/or inflammatory diseases and conditions such as breast, lung, prostate, colorectal, brain, esophageal, bladder, pancreatic, cervical, head and neck, and ovarian cancer, melanoma, lymphoma, glioma, multidrug resistant cancers, rheumatoid arthritis, restenosis, asthma, Crohn's disease, diabetes, obesity, autoimmune disease, lupus, multiple sclerosis, transplant/graft rejection, gene therapy applications, ischemia/reperfusion injury (CNS and myocardial), glomerulonephritis, sepsis, allergic airway inflammation, inflammatory bowel disease, infection, incontinentia pigmenti and any other diseases or conditions that are related to or respond to the levels of IKK-gamma or PKR in a cell or tissue. The present body of knowledge in IKK-gamma and PKR research indicates the need for methods to assay IKK-gamma and PKR activity and for compounds that can regulate IKK-gamma and PKR expression for research, diagnostic, and therapeutic use.

[0377] The use of monoclonal antibodies, chemotherapy, radiation therapy, analgesics, and/or anti-inflammatory compounds, are all non-limiting examples of a methods that can be combined with or used in conjunction with the nucleic acid molecules (e.g. ribozymes and antisense molecules) of the instant invention. Common chemotherapies that can be combined with nucleic acid molecules of the instant invention include various combinations of cytotoxic drugs to kill cancer cells. These drugs include but are not limited to paclitaxel (Taxol), docetaxel, cisplatin, methotrexate, cyclophosphamide, doxorubin, fluorouracil carboplatin, edatrexate, gemcitabine, vinorelbine etc. Those skilled in the art will recognize that other drug compounds and therapies can be similarly be readily combined with the nucleic acid molecules of the instant invention (e.g. ribozymes and antisense molecules) are hence within the scope of the instant invention.

Diagnostic Uses

[0378] The nucleic acid molecules of this invention (e.g., enzymatic nucleic acid molecules) can be used as diagnostic tools to examine genetic drift and mutations within diseased cells or to detect the presence of IKK-gamma or PKR RNA in a cell. The close relationship between enzymatic nucleic acid molecule activity and the structure of the target RNA allows the detection of mutations in any region of the molecule which alters the base-pairing and three-dimensional structure of the target RNA. By using multiple enzymatic nucleic acid molecules described in this invention, one can map nucleotide changes which are important to RNA structure and function in vitro, as well as in cells and tissues. Cleavage of target RNAs with enzymatic nucleic acid molecules can be used to inhibit gene expression and define the role (essentially) of specified gene products in the progression of disease. In this manner, other genetic targets can be defined as important mediators of the disease. These experiments can lead to better treatment of the disease progression by affording the possibility of combinational therapies (e.g., multiple enzymatic nucleic acid molecules targeted to different genes, enzymatic nucleic acid molecules coupled with known small molecule inhibitors, or intermittent treatment with combinations of enzymatic nucleic acid molecules and/or other chemical or biological molecules). Other in vitro uses of enzymatic nucleic acid molecules of this invention are well known in the art, and include detection of the presence of mRNAs associated with IKK-gamma or PKR-related condition. Such RNA is detected by determining the presence of a cleavage product after treatment with an enzymatic nucleic acid molecule using standard methodology.

[0379] In a specific example, enzymatic nucleic acid molecules which cleave only wild-type or mutant forms of the target RNA are used for the assay. The first enzymatic nucleic acid molecule is used to identify wild-type RNA present in the sample and the second enzymatic nucleic acid molecule is used to identify mutant RNA in the sample. As reaction controls, synthetic substrates of both wild-type and mutant RNA are cleaved by both enzymatic nucleic acid molecules to demonstrate the relative enzymatic nucleic acid molecule efficiencies in the reactions and the absence of cleavage of the “non-targeted” RNA species. The cleavage products from the synthetic substrates also serve to generate size markers for the analysis of wild-type and mutant RNAs in the sample population. Thus each analysis requires two enzymatic nucleic acid molecules, two substrates and one unknown sample which is combined into six reactions. The presence of cleavage products is determined using an RNAse protection assay so that full-length and cleavage fragments of each RNA can be analyzed in one lane of a polyacrylamide gel. It is not absolutely required to quantify the results to gain insight into the expression of mutant RNAs and putative risk of the desired phenotypic changes in target cells. The expression of mRNA whose protein product is implicated in the development of the phenotype (i.e., IKK-gamma or PKR) is adequate to establish risk. If probes of comparable specific activity are used for both transcripts, then a qualitative comparison of RNA levels will be adequate and will decrease the cost of the initial diagnosis. Higher mutant form to wild-type ratios are correlated with higher risk whether RNA levels are compared qualitatively or quantitatively. The use of enzymatic nucleic acid molecules in diagnostic applications contemplated by the instant invention is more fully described in George et al., U.S. Pat. Nos. 5,834,186 and 5,741,679, Shih et al., U.S. Pat. No. 5,589,332, Nathan et al., U.S. Pat. No. 5,871,914, Nathan and Ellington, International PCT publication No. WO 00/24931, Breaker et al., International PCT Publication Nos. WO 00/26226 and 98/27104, and Sullenger et al., International PCT publication No. WO 99/29842.

Additional Uses

[0380] Potential uses of sequence-specific enzymatic nucleic acid molecules of the instant invention can have many of the same applications for the study of RNA that DNA restriction endonucleases have for the study of DNA (Nathans et al., 1975 Ann. Rev. Biochem. 44:273). For example, the pattern of restriction fragments can be used to establish sequence relationships between two related RNAs, and large RNAs can be specifically cleaved to fragments of a size more useful for study. The ability to engineer sequence specificity of the enzymatic nucleic acid molecule is ideal for cleavage of RNAs of unknown sequence. Applicant has described the use of nucleic acid molecules to down-regulate gene expression of target genes in bacterial, microbial, fungal, viral, and eukaryotic systems including plant, or mammalian cells.

[0381] All patents and publications mentioned in the specification are indicative of the levels of skill of those skilled in the art to which the invention pertains. All references cited in this disclosure are incorporated by reference to the same extent as if each reference had been incorporated by reference in its entirety individually.

[0382] One skilled in the art would readily appreciate that the present invention is well adapted to carry out the objects and obtain the ends and advantages mentioned, as well as those inherent therein. The methods and compositions described herein as presently representative of preferred embodiments are exemplary and are not intended as limitations on the scope of the invention. Changes therein and other uses will occur to those skilled in the art, which are encompassed within the spirit of the invention, are defined by the scope of the claims.

[0383] It will be readily apparent to one skilled in the art that varying substitutions and modifications may be made to the invention disclosed herein without departing from the scope and spirit of the invention. Thus, such additional embodiments are within the scope of the present invention and the following claims.

[0384] The invention illustratively described herein suitably can be practiced in the absence of any element or elements, limitation or limitations that is not specifically disclosed herein. Thus, for example, in each instance herein any of the terms “comprising”, “consisting essentially of” and “consisting of” can be replaced with either of the other two terms. The terms and expressions that have been employed are used as terms of description and not of limitation, and there is no intention that in the use of such terms and expressions of excluding any equivalents of the features shown and described or portions thereof, but it is recognized that various modifications are possible within the scope of the invention claimed. Thus, it should be understood that although the present invention has been specifically disclosed by preferred embodiments, optional features, modification and variation of the concepts herein disclosed may be resorted to by those skilled in the art, and that such modifications and variations are considered to be within the scope of this invention as defined by the description and the appended claims.

[0385] In addition, where features or aspects of the invention are described in terms of Markush groups or other grouping of alternatives, those skilled in the art will recognize that the invention is also thereby described in terms of any individual member or subgroup of members of the Markush group or other group.

[0386] Other embodiments are within the following claims.

LENGTHY TABLE REFERENCED HERE
US20070026394A1-20070201-T00001
Please refer to the end of the specification for access instructions.

LENGTHY TABLE REFERENCED HERE
US20070026394A1-20070201-T00002
Please refer to the end of the specification for access instructions.

LENGTHY TABLE REFERENCED HERE
US20070026394A1-20070201-T00003
Please refer to the end of the specification for access instructions.

LENGTHY TABLE REFERENCED HERE
US20070026394A1-20070201-T00004
Please refer to the end of the specification for access instructions.

LENGTHY TABLE REFERENCED HERE
US20070026394A1-20070201-T00005
Please refer to the end of the specification for access instructions.

LENGTHY TABLE REFERENCED HERE
US20070026394A1-20070201-T00006
Please refer to the end of the specification for access instructions.

LENGTHY TABLE REFERENCED HERE
US20070026394A1-20070201-T00007
Please refer to the end of the specification for access instructions.

LENGTHY TABLE REFERENCED HERE
US20070026394A1-20070201-T00008
Please refer to the end of the specification for access instructions.

LENGTHY TABLE REFERENCED HERE
US20070026394A1-20070201-T00009
Please refer to the end of the specification for access instructions.

LENGTHY TABLE REFERENCED HERE
US20070026394A1-20070201-T00010
Please refer to the end of the specification for access instructions.

LENGTHY TABLE REFERENCED HERE
US20070026394A1-20070201-T00011
Please refer to the end of the specification for access instructions.

LENGTHY TABLE REFERENCED HERE
US20070026394A1-20070201-T00012
Please refer to the end of the specification for access instructions.

LENGTHY TABLE REFERENCED HERE
US20070026394A1-20070201-T00013
Please refer to the end of the specification for access instructions.

LENGTHY TABLE REFERENCED HERE
US20070026394A1-20070201-T00014
Please refer to the end of the specification for access instructions.

LENGTHY TABLE REFERENCED HERE
US20070026394A1-20070201-T00015
Please refer to the end of the specification for access instructions.

LENGTHY TABLE REFERENCED HERE
US20070026394A1-20070201-T00016
Please refer to the end of the specification for access instructions.

LENGTHY TABLE REFERENCED HERE
US20070026394A1-20070201-T00017
Please refer to the end of the specification for access instructions.

LENGTHY TABLE REFERENCED HERE
US20070026394A1-20070201-T00018
Please refer to the end of the specification for access instructions.

LENGTHY TABLE REFERENCED HERE
US20070026394A1-20070201-T00019
Please refer to the end of the specification for access instructions.

LENGTHY TABLE REFERENCED HERE
US20070026394A1-20070201-T00020
Please refer to the end of the specification for access instructions.

LENGTHY TABLE REFERENCED HERE
US20070026394A1-20070201-T00021
Please refer to the end of the specification for access instructions.

LENGTHY TABLE REFERENCED HERE
US20070026394A1-20070201-T00022
Please refer to the end of the specification for access instructions.

LENGTHY TABLE REFERENCED HERE
US20070026394A1-20070201-T00023
Please refer to the end of the specification for access instructions.

LENGTHY TABLE
The patent application contains a lengthy table section. A copy of the table is available in electronic form from the USPTO web site (http://seqdata.uspto.gov/?pageRequest=docDetail&DocID=US20070026394A1) An electronic copy of the table will also be available from the USPTO upon request and payment of the fee set forth in 37 CFR 1.19(b)(3).

The application's sequence listing, which the Patent Office published only in electronic form, follows.

SEQUENCE LISTING (13274 sequences)

SEQ ID NO: 1 - RNA, 17 nt, Homo sapiens
caaccccuacgaugaag

SEQ ID NO: 2 - RNA, 17 nt, Homo sapiens
gagggcguccgcuggag

SEQ ID NO: 3 - RNA, 17 nt, Homo sapiens
gccugcguaugcuacaa

SEQ ID NO: 4 - RNA, 17 nt, Homo sapiens
cguaugcuacaaugagc

SEQ ID NO: 5 - RNA, 17 nt, Homo sapiens
gugggcaucccugcugc

SEQ ID NO: 6 - RNA, 17 nt, Homo sapiens
cagcgcaucuuccugca

SEQ ID NO: 7 - RNA, 17 nt, Homo sapiens
gcgcaucuuccugcacg

SEQ ID NO: 8 - RNA, 17 nt, Homo sapiens
cgcaucuuccugcacgg

SEQ ID NO: 9 - RNA, 17 nt, Homo sapiens
aaccgcaucucgcaugu

SEQ ID NO: 10 - RNA, 17 nt, Homo sapiens
ccgcaucucgcaugugc

SEQ ID NO: 11 - RNA, 17 nt, Homo sapiens
ugccagcuuccgugccu

SEQ ID NO: 12 - RNA, 17 nt, Homo sapiens
gccagcuuccgugccug

SEQ ID NO: 13 - RNA, 17 nt, Homo sapiens
cgcaaccucaccauccu

SEQ ID NO: 14 - RNA, 17 nt, Homo sapiens
cucaccauccuguggcu

SEQ ID NO: 15 - RNA, 17 nt, Homo sapiens
gcugcacucgaaugugc

SEQ ID NO: 16 - RNA, 17 nt, Homo sapiens
gcccgaauugaugcggc

SEQ ID NO: 17 - RNA, 17 nt, Homo sapiens
ggcugccuucacuggcc

SEQ ID NO: 18 - RNA, 17 nt, Homo sapiens
gcugccuucacuggccu

SEQ ID NO: 19 - RNA, 17 nt, Homo sapiens
cuggcccuccuggagca

SEQ ID NO: 20 - RNA, 17 nt, Homo sapiens
cuggaccucagcgauaa

SEQ ID NO: 21 - RNA, 17 nt, Homo sapiens
ucagcgauaaugcacag

SEQ ID NO: 22 - RNA, 17 nt, Homo sapiens
gcacagcuccggucugu

SEQ ID NO: 23 - RNA, 17 nt, Homo sapiens
gcuccggucuguggacc

SEQ ID NO: 24 - RNA, 17 nt, Homo sapiens
ugccacauuccacggcc

SEQ ID NO: 25 - RNA, 17 nt, Homo sapiens
gccacauuccacggccu

SEQ ID NO: 26 - RNA, 17 nt, Homo sapiens
ggccgccuacacacgcu

SEQ ID NO: 27 - RNA, 17 nt, Homo sapiens
ggggcuguuccgcggcc

SEQ ID NO: 28 - RNA, 17 nt, Homo sapiens
gggcuguuccgcggccu

SEQ ID NO: 29 - RNA, 17 nt, Homo sapiens
ccugcaguaccucuacc

SEQ ID NO: 30 - RNA, 17 nt, Homo sapiens
caguaccucuaccugca

SEQ ID NO: 31 - RNA, 17 nt, Homo sapiens
guaccucuaccugcagg

SEQ ID NO: 32 - RNA, 17 nt, Homo sapiens
ugacaccuuccgcgacc

SEQ ID NO: 33 - RNA, 17 nt, Homo sapiens
gacaccuuccgcgaccu

SEQ ID NO: 34 - RNA, 17 nt, Homo sapiens
ggcaaccucacacaccu

SEQ ID NO: 35 - RNA, 17 nt, Homo sapiens
acacaccucuuccugca

SEQ ID NO: 36 - RNA, 17 nt, Homo sapiens
acaccucuuccugcacg

SEQ ID NO: 37 - RNA, 17 nt, Homo sapiens
caccucuuccugcacgg

SEQ ID NO: 38 - RNA, 17 nt, Homo sapiens
aaccgcaucuccagcgu

SEQ ID NO: 39 - RNA, 17 nt, Homo sapiens
ccgcaucuccagcgugc

SEQ ID NO: 40 - RNA, 17 nt, Homo sapiens
gcgcgccuuccgugggc

SEQ ID NO: 41 - RNA, 17 nt, Homo sapiens
cgcgccuuccgugggcu

SEQ ID NO: 42 - RNA, 17 nt, Homo sapiens
cacagccucgaccgucu

SEQ ID NO: 43 - RNA, 17 nt, Homo sapiens
ucgaccgucuccuacug

SEQ ID NO: 44 - RNA, 17 nt, Homo sapiens
gaccgucuccuacugca

SEQ ID NO: 45 - RNA, 17 nt, Homo sapiens
cgucuccuacugcacca

SEQ ID NO: 46 - RNA, 17 nt, Homo sapiens
gcaugccuuccgugacc

SEQ ID NO: 47 - RNA, 17 nt, Homo sapiens
caugccuuccgugaccu

SEQ ID NO: 48 - RNA, 17 nt, Homo sapiens
cgugaccuuggccgccu

SEQ ID NO: 49 - RNA, 17 nt, Homo sapiens
ggccgccucaugacacu

SEQ ID NO: 50 - RNA, 17 nt, Homo sapiens
augacacucuaucuguu

SEQ ID NO: 51 - RNA, 17 nt, Homo sapiens
gacacucuaucuguuug

SEQ ID NO: 52 - RNA, 17 nt, Homo sapiens
cacucuaucuguuugcc

SEQ ID NO: 53 - RNA, 17 nt, Homo sapiens
cuaucuguuugccaaca

SEQ ID NO: 54 - RNA, 17 nt, Homo sapiens
uaucuguuugccaacaa

SEQ ID NO: 55 - RNA, 17 nt, Homo sapiens
ccaacaaucuaucagcg

SEQ ID NO: 56 - RNA, 17 nt, Homo sapiens
aacaaucuaucagcgcu

SEQ ID NO: 57 - RNA, 17 nt, Homo sapiens
caaucuaucagcgcugc

SEQ ID NO: 58 - RNA, 17 nt, Homo sapiens
ccugcaguaccugaggc

SEQ ID NO: 59 - RNA, 17 nt, Homo sapiens
cugaggcucaacgacaa

SEQ ID NO: 60 - RNA, 17 nt, Homo sapiens
cgcccacucugggccug

SEQ ID NO: 61 - RNA, 17 nt, Homo sapiens
gcagaaguuccgcggcu

SEQ ID NO: 62 - RNA, 17 nt, Homo sapiens
cagaaguuccgcggcuc

SEQ ID NO: 63 - RNA, 17 nt, Homo sapiens
ccgcggcuccuccuccg

SEQ ID NO: 64 - RNA, 17 nt, Homo sapiens
cggcuccuccuccgagg

SEQ ID NO: 65 - RNA, 17 nt, Homo sapiens
cuccuccuccgaggugc

SEQ ID NO: 66 - RNA, 17 nt, Homo sapiens
ugcagccucccgcaacg

SEQ ID NO: 67 - RNA, 17 nt, Homo sapiens
cgugaccucaaacgccu

SEQ ID NO: 68 - RNA, 17 nt, Homo sapiens
aaacgccuagcugccaa

SEQ ID NO: 69 - RNA, 17 nt, Homo sapiens
ccggcccuuaccauccc

SEQ ID NO: 70 - RNA, 17 nt, Homo sapiens
cggcccuuaccauccca

SEQ ID NO: 71 - RNA, 17 nt, Homo sapiens
cuuaccaucccaucugg

SEQ ID NO: 72 - RNA, 17 nt, Homo sapiens
caucccaucuggaccgg

SEQ ID NO: 73 - RNA, 17 nt, Homo sapiens
cuggggcuucccaagug

SEQ ID NO: 74 - RNA, 17 nt, Homo sapiens
uggggcuucccaagugc

SEQ ID NO: 75 - RNA, 17 nt, Homo sapiens
caaggccucaguacugg

SEQ ID NO: 76 - RNA, 17 nt, Homo sapiens
gccucaguacuggagcc

SEQ ID NO: 77 - RNA, 17 nt, Homo sapiens
gaccagcuucggcaggc

SEQ ID NO: 78 - RNA, 17 nt, Homo sapiens
accagcuucggcaggca

SEQ ID NO: 79 - RNA, 17 nt, Homo sapiens
caacggcucuggcccac

SEQ ID NO: 80 - RNA, 17 nt, Homo sapiens
cggcacaucaaugacuc

SEQ ID NO: 81 - RNA, 17 nt, Homo sapiens
caaugacucacccuuug

SEQ ID NO: 82 - RNA, 17 nt, Homo sapiens
cucacccuuugggacuc

SEQ ID NO: 83 - RNA, 17 nt, Homo sapiens
ucacccuuugggacucu

SEQ ID NO: 84 - RNA, 17 nt, Homo sapiens
uugggacucugccuggc

SEQ ID NO: 85 - RNA, 17 nt, Homo sapiens
gccuggcucugcugagc

SEQ ID NO: 86 - RNA, 17 nt, Homo sapiens
cccccgcucacugcagu

SEQ ID NO: 87 - RNA, 17 nt, Homo sapiens
cgagggcuccgagccac

SEQ ID NO: 88 - RNA, 17 nt, Homo sapiens
accaggguuccccaccu

SEQ ID NO: 89 - RNA, 17 nt, Homo sapiens
ccaggguuccccaccuc

SEQ ID NO: 90 - RNA, 17 nt, Homo sapiens
ccccaccucgggcccuc

SEQ ID NO: 91 - RNA, 17 nt, Homo sapiens
cgggcccucgccggagg

SEQ ID NO: 92 - RNA, 17 nt, Homo sapiens
caggcuguucacgcaag

SEQ ID NO: 93 - RNA, 17 nt, Homo sapiens
aggcuguucacgcaaga

SEQ ID NO: 94 - RNA, 17 nt, Homo sapiens
acugccgucugggccag

SEQ ID NO: 95 - RNA, 17 nt, Homo sapiens
uggugacucagaaggcu

SEQ ID NO: 96 - RNA, 17 nt, Homo sapiens
agaaggcucaggugccc

SEQ ID NO: 97 - RNA, 17 nt, Homo sapiens
ggugcccuacccagccu

SEQ ID NO: 98 - RNA, 17 nt, Homo sapiens
cccagccucaccugcag

SEQ ID NO: 99 - RNA, 17 nt, Homo sapiens
ugcagccucaccccccu

SEQ ID NO: 100 - RNA, 17 nt, Homo sapiens
acagugcuugggcccug

SEQ ID NO: 101 - RNA, 17 nt, Homo sapiens
ccaaccccuacgaugaa

SEQ ID NO: 102 - RNA, 17 nt, Homo sapiens
agggcguccgcuggagg

SEQ ID NO: 103 - RNA, 17 nt, Homo sapiens
gcguccgcuggagggag

SEQ ID NO: 104 - RNA, 17 nt, Homo sapiens
gagggagccggcugcug

SEQ ID NO: 105 - RNA, 17 nt, Homo sapiens
gagccggcugcuggcau

SEQ ID NO: 106 - RNA, 17 nt, Homo sapiens
ccggcugcuggcauggg

SEQ ID NO: 107 - RNA, 17 nt, Homo sapiens
cugcuggcaugggugcu

SEQ ID NO: 108 - RNA, 17 nt, Homo sapiens
augggugcuguggcugc

SEQ ID NO: 109 - RNA, 17 nt, Homo sapiens
gcuguggcugcaggccu

SEQ ID NO: 110 - RNA, 17 nt, Homo sapiens
guggcugcaggccuggc

SEQ ID NO: 111 - RNA, 17 nt, Homo sapiens
cugcaggccuggcaggu

SEQ ID NO: 112 - RNA, 17 nt, Homo sapiens
ugcaggccuggcaggug

SEQ ID NO: 113 - RNA, 17 nt, Homo sapiens
ggccuggcagguggcag

SEQ ID NO: 114 - RNA, 17 nt, Homo sapiens
cagguggcagccccaug

SEQ ID NO: 115 - RNA, 17 nt, Homo sapiens
guggcagccccaugccc

SEQ ID NO: 116 - RNA, 17 nt, Homo sapiens
uggcagccccaugccca

SEQ ID NO: 117 - RNA, 17 nt, Homo sapiens
ggcagccccaugcccag

SEQ ID NO: 118 - RNA, 17 nt, Homo sapiens
gcagccccaugcccagg

SEQ ID NO: 119 - RNA, 17 nt, Homo sapiens
ccccaugcccaggugcc

SEQ ID NO: 120 - RNA, 17 nt, Homo sapiens
cccaugcccaggugccu

SEQ ID NO: 121 - RNA, 17 nt, Homo sapiens
ccaugcccaggugccug

SEQ ID NO: 122 - RNA, 17 nt, Homo sapiens
ccaggugccugcguaug

SEQ ID NO: 123 - RNA, 17 nt, Homo sapiens
caggugccugcguaugc

SEQ ID NO: 124 - RNA, 17 nt, Homo sapiens
gcguaugcuacaaugag

SEQ ID NO: 125 - RNA, 17 nt, Homo sapiens
uaugcuacaaugagccc

SEQ ID NO: 126 - RNA, 17 nt, Homo sapiens
caaugagcccaagguga

SEQ ID NO: 127 - RNA, 17 nt, Homo sapiens
aaugagcccaaggugac

SEQ ID NO: 128 - RNA, 17 nt, Homo sapiens
augagcccaaggugacg

SEQ ID NO: 129 - RNA, 17 nt, Homo sapiens
gugacgacaagcugccc

SEQ ID NO: 130 - RNA, 17 nt, Homo sapiens
cgacaagcugcccccag

SEQ ID NO: 131 - RNA, 17 nt, Homo sapiens
caagcugcccccagcag

SEQ ID NO: 132 - RNA, 17 nt, Homo sapiens
aagcugcccccagcagg

SEQ ID NO: 133 - RNA, 17 nt, Homo sapiens
agcugcccccagcaggg

SEQ ID NO: 134 - RNA, 17 nt, Homo sapiens
gcugcccccagcagggc

SEQ ID NO: 135 - RNA, 17 nt, Homo sapiens
cugcccccagcagggcc

SEQ ID NO: 136 - RNA, 17 nt, Homo sapiens
cccccagcagggccugc

SEQ ID NO: 137 - RNA, 17 nt, Homo sapiens
agcagggccugcaggcu

SEQ ID NO: 138 - RNA, 17 nt, Homo sapiens
gcagggccugcaggcug

SEQ ID NO: 139 - RNA, 17 nt, Homo sapiens
gggccugcaggcugugc

SEQ ID NO: 140 - RNA, 17 nt, Homo sapiens
cugcaggcugugcccgu

SEQ ID NO: 141 - RNA, 17 nt, Homo sapiens
ggcugugcccgugggca

SEQ ID NO: 142 - RNA, 17 nt, Homo sapiens
gcugugcccgugggcau

SEQ ID NO: 143 - RNA, 17 nt, Homo sapiens
ccgugggcaucccugcu

SEQ ID NO: 144 - RNA, 17 nt, Homo sapiens
ugggcaucccugcugcc

SEQ ID NO: 145 - RNA, 17 nt, Homo sapiens
gggcaucccugcugcca

SEQ ID NO: 146 - RNA, 17 nt, Homo sapiens
ggcaucccugcugccag

SEQ ID NO: 147 - RNA, 17 nt, Homo sapiens
aucccugcugccagcca

SEQ ID NO: 148 - RNA, 17 nt, Homo sapiens
ccugcugccagccagcg

SEQ ID NO: 149 - RNA, 17 nt, Homo sapiens
cugcugccagccagcgc

SEQ ID NO: 150 - RNA, 17 nt, Homo sapiens
cugccagccagcgcauc

SEQ ID NO: 151 - RNA, 17 nt, Homo sapiens
ugccagccagcgcaucu

SEQ ID NO: 152 - RNA, 17 nt, Homo sapiens
gccagcgcaucuuccug

SEQ ID NO: 153 - RNA, 17 nt, Homo sapiens
agcgcaucuuccugcac

SEQ ID NO: 154 - RNA, 17 nt, Homo sapiens
gcaucuuccugcacggc

SEQ ID NO: 155 - RNA, 17 nt, Homo sapiens
caucuuccugcacggca

SEQ ID NO: 156 - RNA, 17 nt, Homo sapiens
cuuccugcacggcaacc

SEQ ID NO: 157 - RNA, 17 nt, Homo sapiens
ugcacggcaaccgcauc

SEQ ID NO: 158 - RNA, 17 nt, Homo sapiens
acggcaaccgcaucucg

SEQ ID NO: 159 - RNA, 17 nt, Homo sapiens
gcaaccgcaucucgcau

SEQ ID NO: 160 - RNA, 17 nt, Homo sapiens
accgcaucucgcaugug

SEQ ID NO: 161 - RNA, 17 nt, Homo sapiens
caucucgcaugugccag

SEQ ID NO: 162 - RNA, 17 nt, Homo sapiens
gcaugugccagcugcca

SEQ ID NO: 163 - RNA, 17 nt, Homo sapiens
caugugccagcugccag

SEQ ID NO: 164 - RNA, 17 nt, Homo sapiens
gugccagcugccagcuu

SEQ ID NO: 165 - RNA, 17 nt, Homo sapiens
ccagcugccagcuuccg

SEQ ID NO: 166 - RNA, 17 nt, Homo sapiens
cagcugccagcuuccgu

SEQ ID NO: 167 - RNA, 17 nt, Homo sapiens
cugccagcuuccgugcc

SEQ ID NO: 168 - RNA, 17 nt, Homo sapiens
ccagcuuccgugccugc

SEQ ID NO: 169 - RNA, 17 nt, Homo sapiens
uuccgugccugccgcaa

SEQ ID NO: 170 - RNA, 17 nt, Homo sapiens
uccgugccugccgcaac

SEQ ID NO: 171 - RNA, 17 nt, Homo sapiens
gugccugccgcaaccuc

SEQ ID NO: 172 - RNA, 17 nt, Homo sapiens
ccugccgcaaccucacc

SEQ ID NO: 173 - RNA, 17 nt, Homo sapiens
gccgcaaccucaccauc

SEQ ID NO: 174 - RNA, 17 nt, Homo sapiens
ccgcaaccucaccaucc

SEQ ID NO: 175 - RNA, 17 nt, Homo sapiens
gcaaccucaccauccug

SEQ ID NO: 176 - RNA, 17 nt, Homo sapiens
aaccucaccauccugug

SEQ ID NO: 177 - RNA, 17 nt, Homo sapiens
accucaccauccugugg

SEQ ID NO: 178 - RNA, 17 nt, Homo sapiens
ucaccauccuguggcug

SEQ ID NO: 179 - RNA, 17 nt, Homo sapiens
caccauccuguggcugc

SEQ ID NO: 180 - RNA, 17 nt, Homo sapiens
ccuguggcugcacucga

SEQ ID NO: 181 - RNA, 17 nt, Homo sapiens
guggcugcacucgaaug

SEQ ID NO: 182 - RNA, 17 nt, Homo sapiens
ggcugcacucgaaugug

SEQ ID NO: 183 - RNA, 17 nt, Homo sapiens
gaaugugcuggcccgaa

SEQ ID NO: 184 - RNA, 17 nt, Homo sapiens
gugcuggcccgaauuga

SEQ ID NO: 185 - RNA, 17 nt, Homo sapiens
ugcuggcccgaauugau

SEQ ID NO: 186 - RNA, 17 nt, Homo sapiens
gaugcggcugccuucac

SEQ ID NO: 187 - RNA, 17 nt, Homo sapiens
gcggcugccuucacugg

SEQ ID NO: 188 - RNA, 17 nt, Homo sapiens
cggcugccuucacuggc

SEQ ID NO: 189 - RNA, 17 nt, Homo sapiens
cugccuucacuggccug

SEQ ID NO: 190 - RNA, 17 nt, Homo sapiens
gccuucacuggccuggc

SEQ ID NO: 191 - RNA, 17 nt, Homo sapiens
ucacuggccuggcccuc

SEQ ID NO: 192 - RNA, 17 nt, Homo sapiens
cacuggccuggcccucc

SEQ ID NO: 193 - RNA, 17 nt, Homo sapiens
ggccuggcccuccugga

SEQ ID NO: 194 - RNA, 17 nt, Homo sapiens
gccuggcccuccuggag

SEQ ID NO: 195 - RNA, 17 nt, Homo sapiens
ccuggcccuccuggagc

SEQ ID NO: 196 - RNA, 17 nt, Homo sapiens
uggcccuccuggagcag

SEQ ID NO: 197 - RNA, 17 nt, Homo sapiens
ggcccuccuggagcagc

SEQ ID NO: 198 - RNA, 17 nt, Homo sapiens
ccuggagcagcuggacc

SEQ ID NO: 199 - RNA, 17 nt, Homo sapiens
ggagcagcuggaccuca

SEQ ID NO: 200 - RNA, 17 nt, Homo sapiens
agcuggaccucagcgau

SEQ ID NO: 201 - RNA, 17 nt, Homo sapiens
gcuggaccucagcgaua

SEQ ID NO: 202 - RNA, 17 nt, Homo sapiens
uggaccucagcgauaau

SEQ ID NO: 203 - RNA, 17 nt, Homo sapiens
gauaaugcacagcuccg

SEQ ID NO: 204 - RNA, 17 nt, Homo sapiens
uaaugcacagcuccggu

SEQ ID NO: 205 - RNA, 17 nt, Homo sapiens
ugcacagcuccggucug

SEQ ID NO: 206 - RNA, 17 nt, Homo sapiens
cacagcuccggucugug

SEQ ID NO: 207 - RNA, 17 nt, Homo sapiens
cuccggucuguggaccc

SEQ ID NO: 208 - RNA, 17 nt, Homo sapiens
cuguggacccugccaca

SEQ ID NO: 209 - RNA, 17 nt, Homo sapiens
uguggacccugccacau

SEQ ID NO: 210 - RNA, 17 nt, Homo sapiens
guggacccugccacauu

SEQ ID NO: 211 - RNA, 17 nt, Homo sapiens
gacccugccacauucca

SEQ ID NO: 212 - RNA, 17 nt, Homo sapiens
acccugccacauuccac

SEQ ID NO: 213 - RNA, 17 nt, Homo sapiens
ccugccacauuccacgg

SEQ ID NO: 214 - RNA, 17 nt, Homo sapiens
ccacauuccacggccug

SEQ ID NO: 215 - RNA, 17 nt, Homo sapiens
cacauuccacggccugg

SEQ ID NO: 216 - RNA, 17 nt, Homo sapiens
uccacggccugggccgc

SEQ ID NO: 217 - RNA, 17 nt, Homo sapiens
ccacggccugggccgcc

SEQ ID NO: 218 - RNA, 17 nt, Homo sapiens
gccugggccgccuacac

SEQ ID NO: 219 - RNA, 17 nt, Homo sapiens
ugggccgccuacacacg

SEQ ID NO: 220 - RNA, 17 nt, Homo sapiens
gggccgccuacacacgc

SEQ ID NO: 221 - RNA, 17 nt, Homo sapiens
ccgccuacacacgcugc

SEQ ID NO: 222 - RNA, 17 nt, Homo sapiens
gccuacacacgcugcac

SEQ ID NO: 223 - RNA, 17 nt, Homo sapiens
acacacgcugcaccugg

SEQ ID NO: 224 - RNA, 17 nt, Homo sapiens
cacgcugcaccuggacc

SEQ ID NO: 225 - RNA, 17 nt, Homo sapiens
cgcugcaccuggaccgc

SEQ ID NO: 226 - RNA, 17 nt, Homo sapiens
gcugcaccuggaccgcu

SEQ ID NO: 227 - RNA, 17 nt, Homo sapiens
accuggaccgcugcggc

SEQ ID NO: 228 - RNA, 17 nt, Homo sapiens
uggaccgcugcggccug

SEQ ID NO: 229 - RNA, 17 nt, Homo sapiens
gcugcggccugcaggag

SEQ ID NO: 230 - RNA, 17 nt, Homo sapiens
cugcggccugcaggagc

SEQ ID NO: 231 - RNA, 17 nt, Homo sapiens
cggccugcaggagcugg

SEQ ID NO: 232 - RNA, 17 nt, Homo sapiens
gcaggagcugggcccgg

SEQ ID NO: 233 - RNA, 17 nt, Homo sapiens
agcugggcccggggcug

SEQ ID NO: 234 - RNA, 17 nt, Homo sapiens
gcugggcccggggcugu

SEQ ID NO: 235 - RNA, 17 nt, Homo sapiens
cccggggcuguuccgcg

SEQ ID NO: 236 - RNA, 17 nt, Homo sapiens
ggcuguuccgcggccug

SEQ ID NO: 237 - RNA, 17 nt, Homo sapiens
uccgcggccuggcugcc

SEQ ID NO: 238 - RNA, 17 nt, Homo sapiens
ccgcggccuggcugccc

SEQ ID NO: 239 - RNA, 17 nt, Homo sapiens
ggccuggcugcccugca

SEQ ID NO: 240 - RNA, 17 nt, Homo sapiens
cuggcugcccugcagua

SEQ ID NO: 241 - RNA, 17 nt, Homo sapiens
uggcugcccugcaguac

SEQ ID NO: 242 - RNA, 17 nt, Homo sapiens
ggcugcccugcaguacc

SEQ ID NO: 243 - RNA, 17 nt, Homo sapiens
ugcccugcaguaccucu

SEQ ID NO: 244 - RNA, 17 nt, Homo sapiens
ugcaguaccucuaccug

SEQ ID NO: 245 - RNA, 17 nt, Homo sapiens
gcaguaccucuaccugc

SEQ ID NO: 246 - RNA, 17 nt, Homo sapiens
aguaccucuaccugcag

SEQ ID NO: 247 - RNA, 17 nt, Homo sapiens
accucuaccugcaggac

SEQ ID NO: 248 - RNA, 17 nt, Homo sapiens
ccucuaccugcaggaca

SEQ ID NO: 249 - RNA, 17 nt, Homo sapiens
cuaccugcaggacaacg

SEQ ID NO: 250 - RNA, 17 nt, Homo sapiens
ugcaggacaacgcgcug

SEQ ID NO: 251 - RNA, 17 nt, Homo sapiens
caacgcgcugcaggcac

SEQ ID NO: 252 - RNA, 17 nt, Homo sapiens
cgcgcugcaggcacugc

SEQ ID NO: 253 - RNA, 17 nt, Homo sapiens
cugcaggcacugccuga

SEQ ID NO: 254 - RNA, 17 nt, Homo sapiens
gcaggcacugccugaug

SEQ ID NO: 255 - RNA, 17 nt, Homo sapiens
ggcacugccugaugaca

SEQ ID NO: 256 - RNA, 17 nt, Homo sapiens
gcacugccugaugacac

SEQ ID NO: 257 - RNA, 17 nt, Homo sapiens
cugaugacaccuuccgc

SEQ ID NO: 258 - RNA, 17 nt, Homo sapiens
gaugacaccuuccgcga

SEQ ID NO: 259 - RNA, 17 nt, Homo sapiens
augacaccuuccgcgac

SEQ ID NO: 260 - RNA, 17 nt, Homo sapiens
acaccuuccgcgaccug

SEQ ID NO: 261 - RNA, 17 nt, Homo sapiens
uccgcgaccugggcaac

SEQ ID NO: 262 - RNA, 17 nt, Homo sapiens
ccgcgaccugggcaacc

SEQ ID NO: 263 - RNA, 17 nt, Homo sapiens
accugggcaaccucaca

SEQ ID NO: 264 - RNA, 17 nt, Homo sapiens
ugggcaaccucacacac

SEQ ID NO: 265 - RNA, 17 nt, Homo sapiens
gggcaaccucacacacc

SEQ ID NO: 266 - RNA, 17 nt, Homo sapiens
gcaaccucacacaccuc

SEQ ID NO: 267 - RNA, 17 nt, Homo sapiens
aaccucacacaccucuu

SEQ ID NO: 268 - RNA, 17 nt, Homo sapiens
ccucacacaccucuucc

SEQ ID NO: 269 - RNA, 17 nt, Homo sapiens
ucacacaccucuuccug

SEQ ID NO: 270 - RNA, 17 nt, Homo sapiens
cacacaccucuuccugc

SEQ ID NO: 271 - RNA, 17 nt, Homo sapiens
cacaccucuuccugcac

SEQ ID NO: 272 - RNA, 17 nt, Homo sapiens
accucuuccugcacggc

SEQ ID NO: 273 - RNA, 17 nt, Homo sapiens
ccucuuccugcacggca

SEQ ID NO: 274 - RNA, 17 nt, Homo sapiens
acggcaaccgcaucucc

SEQ ID NO: 275 - RNA, 17 nt, Homo sapiens
gcaaccgcaucuccagc

SEQ ID NO: 276 - RNA, 17 nt, Homo sapiens
accgcaucuccagcgug

SEQ ID NO: 277 - RNA, 17 nt, Homo sapiens
cgcaucuccagcgugcc

SEQ ID NO: 278 - RNA, 17 nt, Homo sapiens
gcaucuccagcgugccc

SEQ ID NO: 279 - RNA, 17 nt, Homo sapiens
cagcgugcccgagcgcg

SEQ ID NO: 280 - RNA, 17 nt, Homo sapiens
agcgugcccgagcgcgc

SEQ ID NO: 281 - RNA, 17 nt, Homo sapiens
gagcgcgccuuccgugg

SEQ ID NO: 282 - RNA, 17 nt, Homo sapiens
agcgcgccuuccguggg

SEQ ID NO: 283 - RNA, 17 nt, Homo sapiens
gcgccuuccgugggcug

SEQ ID NO: 284 - RNA, 17 nt, Homo sapiens
ccgugggcugcacagcc

SEQ ID NO: 285 - RNA, 17 nt, Homo sapiens
ugggcugcacagccucg

SEQ ID NO: 286 - RNA, 17 nt, Homo sapiens
ggcugcacagccucgac

SEQ ID NO: 287 - RNA, 17 nt, Homo sapiens
ugcacagccucgaccgu

SEQ ID NO: 288 - RNA, 17 nt, Homo sapiens
gcacagccucgaccguc

SEQ ID NO: 289 - RNA, 17 nt, Homo sapiens
gccucgaccgucuccua

SEQ ID NO: 290 - RNA, 17 nt, Homo sapiens
cgaccgucuccuacugc

SEQ ID NO: 291 - RNA, 17 nt, Homo sapiens
accgucuccuacugcac

SEQ ID NO: 292 - RNA, 17 nt, Homo sapiens
ccgucuccuacugcacc

SEQ ID NO: 293 - RNA, 17 nt, Homo sapiens
ucuccuacugcaccaga

SEQ ID NO: 294 - RNA, 17 nt, Homo sapiens
ccuacugcaccagaacc

SEQ ID NO: 295 - RNA, 17 nt, Homo sapiens
uacugcaccagaaccgc

SEQ ID NO: 296 - RNA, 17 nt, Homo sapiens
acugcaccagaaccgcg

SEQ ID NO: 297 - RNA, 17 nt, Homo sapiens
accagaaccgcguggcc

SEQ ID NO: 298 - RNA, 17 nt, Homo sapiens
cgcguggcccaugugca

SEQ ID NO: 299 - RNA, 17 nt, Homo sapiens
gcguggcccaugugcac

SEQ ID NO: 300 - RNA, 17 nt, Homo sapiens
cguggcccaugugcacc

SEQ ID NO: 301 - RNA, 17 nt, Homo sapiens
ccaugugcacccgcaug

SEQ ID NO: 302 - RNA, 17 nt, Homo sapiens
augugcacccgcaugcc

SEQ ID NO: 303 - RNA, 17 nt, Homo sapiens
ugugcacccgcaugccu

SEQ ID NO: 304 - RNA, 17 nt, Homo sapiens
gcacccgcaugccuucc

SEQ ID NO: 305 - RNA, 17 nt, Homo sapiens
ccgcaugccuuccguga

SEQ ID NO: 306 - RNA, 17 nt, Homo sapiens
cgcaugccuuccgugac

SEQ ID NO: 307 - RNA, 17 nt, Homo sapiens
augccuuccgugaccuu

SEQ ID NO: 308 - RNA, 17 nt, Homo sapiens
uccgugaccuuggccgc

SEQ ID NO: 309 - RNA, 17 nt, Homo sapiens
ccgugaccuuggccgcc

SEQ ID NO: 310 - RNA, 17 nt, Homo sapiens
accuuggccgccucaug

SEQ ID NO: 311 - RNA, 17 nt, Homo sapiens
uuggccgccucaugaca

SEQ ID NO: 312 - RNA, 17 nt, Homo sapiens
uggccgccucaugacac

SEQ ID NO: 313 - RNA, 17 nt, Homo sapiens
gccgccucaugacacuc

SEQ ID NO: 314 - RNA, 17 nt, Homo sapiens
cucaugacacucuaucu

SEQ ID NO: 315 - RNA, 17 nt, Homo sapiens
caugacacucuaucugu

SEQ ID NO: 316 - RNA, 17 nt, Homo sapiens
ugacacucuaucuguuu

SEQ ID NO: 317 - RNA, 17 nt, Homo sapiens
acucuaucuguuugcca

SEQ ID NO: 318 - RNA, 17 nt, Homo sapiens
cuguuugccaacaaucu

SEQ ID NO: 319 - RNA, 17 nt, Homo sapiens
uguuugccaacaaucua

SEQ ID NO: 320 - RNA, 17 nt, Homo sapiens
uugccaacaaucuauca

SEQ ID NO: 321 - RNA, 17 nt, Homo sapiens
caacaaucuaucagcgc

SEQ ID NO: 322 - RNA, 17 nt, Homo sapiens
aaucuaucagcgcugcc

SEQ ID NO: 323 - RNA, 17 nt, Homo sapiens
aucagcgcugcccacug

SEQ ID NO: 324 - RNA, 17 nt, Homo sapiens
agcgcugcccacugagg

SEQ ID NO: 325 - RNA, 17 nt, Homo sapiens
gcgcugcccacugaggc

SEQ ID NO: 326 - RNA, 17 nt, Homo sapiens
cgcugcccacugaggcc

SEQ ID NO: 327 - RNA, 17 nt, Homo sapiens
cugcccacugaggcccu

SEQ ID NO: 328 - RNA, 17 nt, Homo sapiens
acugaggcccuggcccc

SEQ ID NO: 329 - RNA, 17 nt, Homo sapiens
cugaggcccuggccccc

SEQ ID NO: 330 - RNA, 17 nt, Homo sapiens
ugaggcccuggcccccc

SEQ ID NO: 331 - RNA, 17 nt, Homo sapiens
gcccuggccccccugcg

SEQ ID NO: 332 - RNA, 17 nt, Homo sapiens
cccuggccccccugcgu

SEQ ID NO: 333 - RNA, 17 nt, Homo sapiens
ccuggccccccugcgug

SEQ ID NO: 334 - RNA, 17 nt, Homo sapiens
cuggccccccugcgugc

SEQ ID NO: 335 - RNA, 17 nt, Homo sapiens
uggccccccugcgugcc

SEQ ID NO: 336 - RNA, 17 nt, Homo sapiens
ggccccccugcgugccc

SEQ ID NO: 337 - RNA, 17 nt, Homo sapiens
cugcgugcccugcagua

SEQ ID NO: 338 - RNA, 17 nt, Homo sapiens
ugcgugcccugcaguac

SEQ ID NO: 339 - RNA, 17 nt, Homo sapiens
gcgugcccugcaguacc

SEQ ID NO: 340 - RNA, 17 nt, Homo sapiens
ugcccugcaguaccuga

SEQ ID NO: 341 - RNA, 17 nt, Homo sapiens
ugcaguaccugaggcuc

SEQ ID NO: 342 - RNA, 17 nt, Homo sapiens
gcaguaccugaggcuca

SEQ ID NO: 343 - RNA, 17 nt, Homo sapiens
ccugaggcucaacgaca

SEQ ID NO: 344 - RNA, 17 nt, Homo sapiens
ugaggcucaacgacaac

SEQ ID NO: 345 - RNA, 17 nt, Homo sapiens
ucaacgacaaccccugg

SEQ ID NO: 346 - RNA, 17 nt, Homo sapiens
acgacaaccccugggug

SEQ ID NO: 347 - RNA, 17 nt, Homo sapiens
cgacaaccccugggugu

SEQ ID NO: 348 - RNA, 17 nt, Homo sapiens
gacaaccccugggugug

SEQ ID NO: 349 - RNA, 17 nt, Homo sapiens
acaaccccugggugugu

SEQ ID NO: 350 - RNA, 17 nt, Homo sapiens
ugugugacugccgggca

SEQ ID NO: 351 - RNA, 17 nt, Homo sapiens
gugacugccgggcacgc

SEQ ID NO: 352 - RNA, 17 nt, Homo sapiens
ugccgggcacgcccacu

SEQ ID NO: 353 - RNA, 17 nt, Homo sapiens
gggcacgcccacucugg

SEQ ID NO: 354 - RNA, 17 nt, Homo sapiens
ggcacgcccacucuggg

SEQ ID NO: 355 - RNA, 17 nt, Homo sapiens
gcacgcccacucugggc

SEQ ID NO: 356 - RNA, 17 nt, Homo sapiens
acgcccacucugggccu

SEQ ID NO: 357 - RNA, 17 nt, Homo sapiens
gcccacucugggccugg

SEQ ID NO: 358 - RNA, 17 nt, Homo sapiens
cucugggccuggcugca

SEQ ID NO: 359 - RNA, 17 nt, Homo sapiens
ucugggccuggcugcag

SEQ ID NO: 360 - RNA, 17 nt, Homo sapiens
ggccuggcugcagaagu

SEQ ID NO: 361 - RNA, 17 nt, Homo sapiens
cuggcugcagaaguucc

SEQ ID NO: 362 - RNA, 17 nt, Homo sapiens
agaaguuccgcggcucc

SEQ ID NO: 363 - RNA, 17 nt, Homo sapiens
uccgcggcuccuccucc

SEQ ID NO: 364 - RNA, 17 nt, Homo sapiens
cgcggcuccuccuccga

SEQ ID NO: 365 - RNA, 17 nt, Homo sapiens
gcggcuccuccuccgag

SEQ ID NO: 366 - RNA, 17 nt, Homo sapiens
ggcuccuccuccgaggu

SEQ ID NO: 367 - RNA, 17 nt, Homo sapiens
gcuccuccuccgaggug

SEQ ID NO: 368 - RNA, 17 nt, Homo sapiens
uccuccuccgaggugcc

SEQ ID NO: 369 - RNA, 17 nt, Homo sapiens
cgaggugcccugcagcc

SEQ ID NO: 370 - RNA, 17 nt, Homo sapiens
gaggugcccugcagccu

SEQ ID NO: 371 - RNA, 17 nt, Homo sapiens
aggugcccugcagccuc

SEQ ID NO: 372 - RNA, 17 nt, Homo sapiens
ugcccugcagccucccg

SEQ ID NO: 373 - RNA, 17 nt, Homo sapiens
ccugcagccucccgcaa

SEQ ID NO: 374 - RNA, 17 nt, Homo sapiens
cugcagccucccgcaac

SEQ ID NO: 375 - RNA, 17 nt, Homo sapiens
gcagccucccgcaacgc

SEQ ID NO: 376 - RNA, 17 nt, Homo sapiens
cagccucccgcaacgcc

SEQ ID NO: 377 - RNA, 17 nt, Homo sapiens
ccucccgcaacgccugg

SEQ ID NO: 378 - RNA, 17 nt, Homo sapiens
cgcaacgccuggcuggc

SEQ ID NO: 379 - RNA, 17 nt, Homo sapiens
gcaacgccuggcuggcc

SEQ ID NO: 380 - RNA, 17 nt, Homo sapiens
cgccuggcuggccguga

SEQ ID NO: 381 - RNA, 17 nt, Homo sapiens
uggcuggccgugaccuc

SEQ ID NO: 382 - RNA, 17 nt, Homo sapiens
gccgugaccucaaacgc

SEQ ID NO: 383 - RNA, 17 nt, Homo sapiens
ccgugaccucaaacgcc

SEQ ID NO: 384 - RNA, 17 nt, Homo sapiens
gugaccucaaacgccua

SEQ ID NO: 385 - RNA, 17 nt, Homo sapiens
ucaaacgccuagcugcc

SEQ ID NO: 386 - RNA, 17 nt, Homo sapiens
caaacgccuagcugcca

SEQ ID NO: 387 - RNA, 17 nt, Homo sapiens
cgccuagcugccaauga

SEQ ID NO: 388 - RNA, 17 nt, Homo sapiens
cuagcugccaaugaccu

SEQ ID NO: 389 - RNA, 17 nt, Homo sapiens
uagcugccaaugaccug

SEQ ID NO: 390 - RNA, 17 nt, Homo sapiens
ccaaugaccugcagggc

SEQ ID NO: 391 - RNA, 17 nt, Homo sapiens
caaugaccugcagggcu

SEQ ID NO: 392 - RNA, 17 nt, Homo sapiens
ugaccugcagggcugcg

SEQ ID NO: 393 - RNA, 17 nt, Homo sapiens
ugcagggcugcgcugug

SEQ ID NO: 394 - RNA, 17 nt, Homo sapiens
ggcugcgcuguggccac

SEQ ID NO: 395 - RNA, 17 nt, Homo sapiens
gcuguggccaccggccc

SEQ ID NO: 396 - RNA, 17 nt, Homo sapiens
cuguggccaccggcccu

SEQ ID NO: 397 - RNA, 17 nt, Homo sapiens
guggccaccggcccuua

SEQ ID NO: 398 - RNA, 17 nt, Homo sapiens
ccaccggcccuuaccau

SEQ ID NO: 399 - RNA, 17 nt, Homo sapiens
caccggcccuuaccauc

SEQ ID NO: 400 - RNA, 17 nt, Homo sapiens
accggcccuuaccaucc

SEQ ID NO: 401 - RNA, 17 nt, Homo sapiens
gcccuuaccaucccauc

SEQ ID NO: 402 - RNA, 17 nt, Homo sapiens
cccuuaccaucccaucu

SEQ ID NO: 403 - RNA, 17 nt, Homo sapiens
uuaccaucccaucugga

SEQ ID NO: 404 - RNA, 17 nt, Homo sapiens
uaccaucccaucuggac

SEQ ID NO: 405 - RNA, 17 nt, Homo sapiens
accaucccaucuggacc

SEQ ID NO: 406 - RNA, 17 nt, Homo sapiens
aucccaucuggaccggc

SEQ ID NO: 407 - RNA, 17 nt, Homo sapiens
aucuggaccggcagggc

SEQ ID NO: 408 - RNA, 17 nt, Homo sapiens
ggaccggcagggccacc

SEQ ID NO: 409 - RNA, 17 nt, Homo sapiens
ggcagggccaccgauga

SEQ ID NO: 410 - RNA, 17 nt, Homo sapiens
gcagggccaccgaugag

SEQ ID NO: 411 - RNA, 17 nt, Homo sapiens
agggccaccgaugagga

SEQ ID NO: 412 - RNA, 17 nt, Homo sapiens
ugaggagccgcuggggc

SEQ ID NO: 413 - RNA, 17 nt, Homo sapiens
ggagccgcuggggcuuc

SEQ ID NO: 414 - RNA, 17 nt, Homo sapiens
gcuggggcuucccaagu

SEQ ID NO: 415 - RNA, 17 nt, Homo sapiens
ggggcuucccaagugcu

SEQ ID NO: 416 - RNA, 17 nt, Homo sapiens
gggcuucccaagugcug

SEQ ID NO: 417 - RNA, 17 nt, Homo sapiens
ggcuucccaagugcugc

SEQ ID NO: 418 - RNA, 17 nt, Homo sapiens
ccaagugcugccagcca

SEQ ID NO: 419 - RNA, 17 nt, Homo sapiens
agugcugccagccagau

SEQ ID NO: 420 - RNA, 17 nt, Homo sapiens
gugcugccagccagaug

SEQ ID NO: 421 - RNA, 17 nt, Homo sapiens
cugccagccagaugccg

SEQ ID NO: 422 - RNA, 17 nt, Homo sapiens
ugccagccagaugccgc

SEQ ID NO: 423 - RNA, 17 nt, Homo sapiens
ccagaugccgcugacaa

SEQ ID NO: 424 - RNA, 17 nt, Homo sapiens
gaugccgcugacaaggc

SEQ ID NO: 425 - RNA, 17 nt, Homo sapiens
ccgcugacaaggccuca

SEQ ID NO: 426 - RNA, 17 nt, Homo sapiens
gacaaggccucaguacu

SEQ ID NO: 427 - RNA, 17 nt, Homo sapiens
acaaggccucaguacug

SEQ ID NO: 428 - RNA, 17 nt, Homo sapiens
aaggccucaguacugga

SEQ ID NO: 429 - RNA, 17 nt, Homo sapiens
cucaguacuggagccug

SEQ ID NO: 430 - RNA, 17 nt, Homo sapiens
acuggagccuggaagac

SEQ ID NO: 431 - RNA, 17 nt, Homo sapiens
cuggagccuggaagacc

SEQ ID NO: 432 - RNA, 17 nt, Homo sapiens
uggaagaccagcuucgg

SEQ ID NO: 433 - RNA, 17 nt, Homo sapiens
ggaagaccagcuucggc

SEQ ID NO: 434 - RNA, 17 nt, Homo sapiens
agaccagcuucggcagg

SEQ ID NO: 435 - RNA, 17 nt, Homo sapiens
gcuucggcaggcaaugc

SEQ ID NO: 436 - RNA, 17 nt, Homo sapiens
cggcaggcaaugcgcug

SEQ ID NO: 437 - RNA, 17 nt, Homo sapiens
caaugcgcugaagggac

SEQ ID NO: 438 - RNA, 17 nt, Homo sapiens
acgcgugccgcccggug

SEQ ID NO: 439 - RNA, 17 nt, Homo sapiens
cgugccgcccggugaca

SEQ ID NO: 440 - RNA, 17 nt, Homo sapiens
gugccgcccggugacag

SEQ ID NO: 441 - RNA, 17 nt, Homo sapiens
ccggugacagcccgccg

SEQ ID NO: 442 - RNA, 17 nt, Homo sapiens
gugacagcccgccgggc

SEQ ID NO: 443 - RNA, 17 nt, Homo sapiens
ugacagcccgccgggca

SEQ ID NO: 444 - RNA, 17 nt, Homo sapiens
cagcccgccgggcaacg

SEQ ID NO: 445 - RNA, 17 nt, Homo sapiens
cgccgggcaacggcucu

SEQ ID NO: 446 - RNA, 17 nt, Homo sapiens
gcaacggcucuggccca

SEQ ID NO: 447 - RNA, 17 nt, Homo sapiens
aacggcucuggcccacg

SEQ ID NO: 448 - RNA, 17 nt, Homo sapiens
gcucuggcccacggcac

SEQ ID NO: 449 - RNA, 17 nt, Homo sapiens
cucuggcccacggcaca

SEQ ID NO: 450 - RNA, 17 nt, Homo sapiens
ucuggcccacggcacau

SEQ ID NO: 451 - RNA, 17 nt, Homo sapiens
cccacggcacaucaaug

SEQ ID NO: 452 - RNA, 17 nt, Homo sapiens
cacggcacaucaaugac

SEQ ID NO: 453 - RNA, 17 nt, Homo sapiens
ggcacaucaaugacuca

SEQ ID NO: 454 - RNA, 17 nt, Homo sapiens
ucaaugacucacccuuu

SEQ ID NO: 455 - RNA, 17 nt, Homo sapiens
aaugacucacccuuugg

SEQ ID NO: 456 - RNA, 17 nt, Homo sapiens
ugacucacccuuuggga

SEQ ID NO: 457 - RNA, 17 nt, Homo sapiens
gacucacccuuugggac

SEQ ID NO: 458 - RNA, 17 nt, Homo sapiens
acucacccuuugggacu

SEQ ID NO: 459 - RNA, 17 nt, Homo sapiens
uuugggacucugccugg

SEQ ID NO: 460 - RNA, 17 nt, Homo sapiens
ugggacucugccuggcu

SEQ ID NO: 461 - RNA, 17 nt, Homo sapiens
gacucugccuggcucug

SEQ ID NO: 462 - RNA, 17 nt, Homo sapiens
acucugccuggcucugc

SEQ ID NO: 463 - RNA, 17 nt, Homo sapiens
ugccuggcucugcugag

SEQ ID NO: 464 - RNA, 17 nt, Homo sapiens
ccuggcucugcugagcc

SEQ ID NO: 465 - RNA, 17 nt, Homo sapiens
ggcucugcugagccccc

SEQ ID NO: 466 - RNA, 17 nt, Homo sapiens
ugcugagcccccgcuca

SEQ ID NO: 467 - RNA, 17 nt, Homo sapiens
gcugagcccccgcucac

SEQ ID NO: 468 - RNA, 17 nt, Homo sapiens
cugagcccccgcucacu

SEQ ID NO: 469 - RNA, 17 nt, Homo sapiens
ugagcccccgcucacug

SEQ ID NO: 470 - RNA, 17 nt, Homo sapiens
gcccccgcucacugcag

SEQ ID NO: 471 - RNA, 17 nt, Homo sapiens
ccccgcucacugcagug

SEQ ID NO: 472 - RNA, 17 nt, Homo sapiens
ccgcucacugcagugcg

SEQ ID NO: 473 - RNA, 17 nt, Homo sapiens
cucacugcagugcggcc

SEQ ID NO: 474 - RNA, 17 nt, Homo sapiens
agugcggcccgagggcu

SEQ ID NO: 475 - RNA, 17 nt, Homo sapiens
gugcggcccgagggcuc

SEQ ID NO: 476 - RNA, 17 nt, Homo sapiens
ccgagggcuccgagcca

SEQ ID NO: 477 - RNA, 17 nt, Homo sapiens
gagggcuccgagccacc

SEQ ID NO: 478 - RNA, 17 nt, Homo sapiens
cuccgagccaccagggu

SEQ ID NO: 479 - RNA, 17 nt, Homo sapiens
uccgagccaccaggguu

SEQ ID NO: 480 - RNA, 17 nt, Homo sapiens
cgagccaccaggguucc

SEQ ID NO: 481 - RNA, 17 nt, Homo sapiens
gagccaccaggguuccc

SEQ ID NO: 482 - RNA, 17 nt, Homo sapiens
caggguuccccaccucg

SEQ ID NO: 483 - RNA, 17 nt, Homo sapiens
aggguuccccaccucgg

SEQ ID NO: 484 - RNA, 17 nt, Homo sapiens
ggguuccccaccucggg

SEQ ID NO: 485 - RNA, 17 nt, Homo sapiens
gguuccccaccucgggc

SEQ ID NO: 486 - RNA, 17 nt, Homo sapiens
uuccccaccucgggccc

SEQ ID NO: 487 - RNA, 17 nt, Homo sapiens
uccccaccucgggcccu

SEQ ID NO: 488 - RNA, 17 nt, Homo sapiens
ccucgggcccucgccgg

SEQ ID NO: 489 - RNA, 17 nt, Homo sapiens
cucgggcccucgccgga

SEQ ID NO: 490 - RNA, 17 nt, Homo sapiens
ucgggcccucgccggag

SEQ ID NO: 491 - RNA, 17 nt, Homo sapiens
gcccucgccggaggcca

SEQ ID NO: 492 - RNA, 17 nt, Homo sapiens
ccggaggccaggcuguu

SEQ ID NO: 493 - RNA, 17 nt, Homo sapiens
cggaggccaggcuguuc

SEQ ID NO: 494 - RNA, 17 nt, Homo sapiens
ggccaggcuguucacgc

SEQ ID NO: 495 - RNA, 17 nt, Homo sapiens
ggcuguucacgcaagaa

SEQ ID NO: 496 - RNA, 17 nt, Homo sapiens
guucacgcaagaaccgc

SEQ ID NO: 497 - RNA, 17 nt, Homo sapiens
gcaagaaccgcacccgc

SEQ ID NO: 498 - RNA, 17 nt, Homo sapiens
agaaccgcacccgcagc

SEQ ID NO: 499 - RNA, 17 nt, Homo sapiens
aaccgcacccgcagcca

SEQ ID NO: 500 - RNA, 17 nt, Homo sapiens
accgcacccgcagccac

SEQ ID NO: 501 - RNA, 17 nt, Homo sapiens
gcacccgcagccacugc

SEQ ID NO: 502 - RNA, 17 nt, Homo sapiens
cccgcagccacugccgu

SEQ ID NO: 503 - RNA, 17 nt, Homo sapiens
ccgcagccacugccguc

SEQ ID NO: 504 - RNA, 17 nt, Homo sapiens
gcagccacugccgucug

SEQ ID NO: 505 - RNA, 17 nt, Homo sapiens
gccacugccgucugggc

SEQ ID NO: 506 - RNA, 17 nt, Homo sapiens
cugccgucugggccagg

SEQ ID NO: 507 - RNA, 17 nt, Homo sapiens
gucugggccaggcaggc

SEQ ID NO: 508 - RNA, 17 nt, Homo sapiens
ucugggccaggcaggca

SEQ ID NO: 509 - RNA, 17 nt, Homo sapiens
ggccaggcaggcagcgg

SEQ ID NO: 510 - RNA, 17 nt, Homo sapiens
aggcaggcagcgggggu

SEQ ID NO: 511 - RNA, 17 nt, Homo sapiens
ggcgggacuggugacuc

SEQ ID NO: 512 - RNA, 17 nt, Homo sapiens
cuggugacucagaaggc

SEQ ID NO: 513 - RNA, 17 nt, Homo sapiens
ggugacucagaaggcuc

SEQ ID NO: 514 - RNA, 17 nt, Homo sapiens
cagaaggcucaggugcc

SEQ ID NO: 515 - RNA, 17 nt, Homo sapiens
gaaggcucaggugcccu

SEQ ID NO: 516 - RNA, 17 nt, Homo sapiens
ucaggugcccuacccag

SEQ ID NO: 517 - RNA, 17 nt, Homo sapiens
caggugcccuacccagc

SEQ ID NO: 518 - RNA, 17 nt, Homo sapiens
aggugcccuacccagcc

SEQ ID NO: 519 - RNA, 17 nt, Homo sapiens
ugcccuacccagccuca

SEQ ID NO: 520 - RNA, 17 nt, Homo sapiens
gcccuacccagccucac

SEQ ID NO: 521 - RNA, 17 nt, Homo sapiens
cccuacccagccucacc

SEQ ID NO: 522 - RNA, 17 nt, Homo sapiens
uacccagccucaccugc

SEQ ID NO: 523 - RNA, 17 nt, Homo sapiens
acccagccucaccugca

SEQ ID NO: 524 - RNA, 17 nt, Homo sapiens
ccagccucaccugcagc

SEQ ID NO: 525 - RNA, 17 nt, Homo sapiens
agccucaccugcagccu

SEQ ID NO: 526 - RNA, 17 nt, Homo sapiens
gccucaccugcagccuc

SEQ ID NO: 527 - RNA, 17 nt, Homo sapiens
ucaccugcagccucacc

SEQ ID NO: 528 - RNA, 17 nt, Homo sapiens
ccugcagccucaccccc

SEQ ID NO: 529 - RNA, 17 nt, Homo sapiens
cugcagccucacccccc

SEQ ID NO: 530 - RNA, 17 nt, Homo sapiens
gcagccucaccccccug

SEQ ID NO: 531 - RNA, 17 nt, Homo sapiens
agccucaccccccuggg

SEQ ID NO: 532 - RNA, 17 nt, Homo sapiens
gccucaccccccugggc

SEQ ID NO: 533 - RNA, 17 nt, Homo sapiens
ccucaccccccugggcc

SEQ ID NO: 534 - RNA, 17 nt, Homo sapiens
cucaccccccugggccu

SEQ ID NO: 535 - RNA, 17 nt, Homo sapiens
ucaccccccugggccug

SEQ ID NO: 536 - RNA, 17 nt, Homo sapiens
caccccccugggccugg

SEQ ID NO: 537 - RNA, 17 nt, Homo sapiens
cccugggccuggcgcug

SEQ ID NO: 538 - RNA, 17 nt, Homo sapiens
ccugggccuggcgcugg

SEQ ID NO: 539 - RNA, 17 nt, Homo sapiens
ccuggcgcuggugcugu

SEQ ID NO: 540 - RNA, 17 nt, Homo sapiens
gcuggugcuguggacag

SEQ ID NO: 541 - RNA, 17 nt, Homo sapiens
cuguggacagugcuugg

SEQ ID NO: 542 - RNA, 17 nt, Homo sapiens
gacagugcuugggcccu

SEQ ID NO: 543 - RNA, 17 nt, Homo sapiens
gcuugggcccugcugac

SEQ ID NO: 544 - RNA, 17 nt, Homo sapiens
cuugggcccugcugacc

SEQ ID NO: 545 - RNA, 17 nt, Homo sapiens
uugggcccugcugaccc

SEQ ID NO: 546 - RNA, 17 nt, Homo sapiens
ggcccugcugaccccca

SEQ ID NO: 547 - RNA, 17 nt, Homo sapiens
ugaagagggcguccgcu

SEQ ID NO: 548 - RNA, 17 nt, Homo sapiens
aagagggcguccgcugg

SEQ ID NO: 549 - RNA, 17 nt, Homo sapiens
gggcguccgcuggaggg

SEQ ID NO: 550 - RNA, 17 nt, Homo sapiens
uggagggagccggcugc

SEQ ID NO: 551 - RNA, 17 nt, Homo sapiens
gggagccggcugcuggc

SEQ ID NO: 552 - RNA, 17 nt, Homo sapiens
agccggcugcuggcaug

SEQ ID NO: 553 - RNA, 17 nt, Homo sapiens
ggcugcuggcaugggug

SEQ ID NO: 554 - RNA, 17 nt, Homo sapiens
uggcaugggugcugugg

SEQ ID NO: 555 - RNA, 17 nt, Homo sapiens
gcaugggugcuguggcu

SEQ ID NO: 556 - RNA, 17 nt, Homo sapiens
ugggugcuguggcugca

SEQ ID NO: 557 - RNA, 17 nt, Homo sapiens
gugcuguggcugcaggc

SEQ ID NO: 558 - RNA, 17 nt, Homo sapiens
cuguggcugcaggccug

SEQ ID NO: 559 - RNA, 17 nt, Homo sapiens
ggcugcaggccuggcag

SEQ ID NO: 560 - RNA, 17 nt, Homo sapiens
caggccuggcagguggc

SEQ ID NO: 561 - RNA, 17 nt, Homo sapiens
ccuggcagguggcagcc

SEQ ID NO: 562 - RNA, 17 nt, Homo sapiens
ggcagguggcagcccca

SEQ ID NO: 563 - RNA, 17 nt, Homo sapiens
agguggcagccccaugc

SEQ ID NO: 564 - RNA, 17 nt, Homo sapiens
agccccaugcccaggug

SEQ ID NO: 565 - RNA, 17 nt, Homo sapiens
augcccaggugccugcg

SEQ ID NO: 566 - RNA, 17 nt, Homo sapiens
gcccaggugccugcgua

SEQ ID NO: 567 - RNA, 17 nt, Homo sapiens
aggugccugcguaugcu

SEQ ID NO: 568 - RNA, 17 nt, Homo sapiens
gugccugcguaugcuac

SEQ ID NO: 569 - RNA, 17 nt, Homo sapiens
cugcguaugcuacaaug

SEQ ID NO: 570 - RNA, 17 nt, Homo sapiens
uacaaugagcccaaggu

SEQ ID NO: 571 - RNA, 17 nt, Homo sapiens
agcccaaggugacgaca

SEQ ID NO: 572 - RNA, 17 nt, Homo sapiens
gacgacaagcugccccc

SEQ ID NO: 573 - RNA, 17 nt, Homo sapiens
gacaagcugcccccagc

SEQ ID NO: 574 - RNA, 17 nt, Homo sapiens
ugcccccagcagggccu

SEQ ID NO: 575 - RNA, 17 nt, Homo sapiens
ccagcagggccugcagg

SEQ ID NO: 576 - RNA, 17 nt, Homo sapiens
cagggccugcaggcugu

SEQ ID NO: 577 - RNA, 17 nt, Homo sapiens
gccugcaggcugugccc

SEQ ID NO: 578 - RNA, 17 nt, Homo sapiens
ugcaggcugugcccgug

SEQ ID NO: 579 - RNA, 17 nt, Homo sapiens
caggcugugcccguggg

SEQ ID NO: 580 - RNA, 17 nt, Homo sapiens
cugugcccgugggcauc

SEQ ID NO: 581 - RNA, 17 nt, Homo sapiens
gcccgugggcaucccug

SEQ ID NO: 582 - RNA, 17 nt, Homo sapiens
gcaucccugcugccagc

SEQ ID NO: 583 - RNA, 17 nt, Homo sapiens
ucccugcugccagccag

SEQ ID NO: 584 - RNA, 17 nt, Homo sapiens
ugcugccagccagcgca

SEQ ID NO: 585 - RNA, 17 nt, Homo sapiens
gccagccagcgcaucuu

SEQ ID NO: 586 - RNA, 17 nt, Homo sapiens
cagccagcgcaucuucc

SEQ ID NO: 587 - RNA, 17 nt, Homo sapiens
aucuuccugcacggcaa

SEQ ID NO: 588 - RNA, 17 nt, Homo sapiens
ccugcacggcaaccgca

SEQ ID NO: 589 - RNA, 17 nt, Homo sapiens
cggcaaccgcaucucgc

SEQ ID NO: 590 - RNA, 17 nt, Homo sapiens
cgcaucucgcaugugcc

SEQ ID NO: 591 - RNA, 17 nt, Homo sapiens
ucucgcaugugccagcu

SEQ ID NO: 592 - RNA, 17 nt, Homo sapiens
ucgcaugugccagcugc

SEQ ID NO: 593 - RNA, 17 nt, Homo sapiens
augugccagcugccagc

SEQ ID NO: 594 - RNA, 17 nt, Homo sapiens
ugccagcugccagcuuc

SEQ ID NO: 595 - RNA, 17 nt, Homo sapiens
agcugccagcuuccgug

SEQ ID NO: 596 - RNA, 17 nt, Homo sapiens
cagcuuccgugccugcc

SEQ ID NO: 597 - RNA, 17 nt, Homo sapiens
gcuuccgugccugccgc

SEQ ID NO: 598 - RNA, 17 nt, Homo sapiens
ccgugccugccgcaacc

SEQ ID NO: 599 - RNA, 17 nt, Homo sapiens
ugccugccgcaaccuca

SEQ ID NO: 600 - RNA, 17 nt, Homo sapiens
accauccuguggcugca

SEQ ID NO: 601 - RNA, 17 nt, Homo sapiens
auccuguggcugcacuc

SEQ ID NO: 602 - RNA, 17 nt, Homo sapiens
cuguggcugcacucgaa

SEQ ID NO: 603 - RNA, 17 nt, Homo sapiens
acucgaaugugcuggcc

SEQ ID NO: 604 - RNA, 17 nt, Homo sapiens
ucgaaugugcuggcccg

SEQ ID NO: 605 - RNA, 17 nt, Homo sapiens
augugcuggcccgaauu

SEQ ID NO: 606 - RNA, 17 nt, Homo sapiens
gaauugaugcggcugcc

SEQ ID NO: 607 - RNA, 17 nt, Homo sapiens
uugaugcggcugccuuc

SEQ ID NO: 608 - RNA, 17 nt, Homo sapiens
augcggcugccuucacu

SEQ ID NO: 609 - RNA, 17 nt, Homo sapiens
cuucacuggccuggccc

SEQ ID NO: 610 - RNA, 17 nt, Homo sapiens
cuggccuggcccuccug

SEQ ID NO: 611 - RNA, 17 nt, Homo sapiens
cuccuggagcagcugga

SEQ ID NO: 612 - RNA, 17 nt, Homo sapiens
cuggagcagcuggaccu

SEQ ID NO: 613 - RNA, 17 nt, Homo sapiens
ggaccucagcgauaaug

SEQ ID NO: 614 - RNA, 17 nt, Homo sapiens
gcgauaaugcacagcuc

SEQ ID NO: 615 - RNA, 17 nt, Homo sapiens
aaugcacagcuccgguc

SEQ ID NO: 616 - RNA, 17 nt, Homo sapiens
cagcuccggucugugga

SEQ ID NO: 617 - RNA, 17 nt, Homo sapiens
uccggucuguggacccu

SEQ ID NO: 618 - RNA, 17 nt, Homo sapiens
uggacccugccacauuc

SEQ ID NO: 619 - RNA, 17 nt, Homo sapiens
auuccacggccugggcc

SEQ ID NO: 620 - RNA, 17 nt, Homo sapiens
cggccugggccgccuac

SEQ ID NO: 621 - RNA, 17 nt, Homo sapiens
ccugggccgccuacaca

SEQ ID NO: 622 - RNA, 17 nt, Homo sapiens
cuacacacgcugcaccu

SEQ ID NO: 623 - RNA, 17 nt, Homo sapiens
cacacgcugcaccugga

SEQ ID NO: 624 - RNA, 17 nt, Homo sapiens
ccuggaccgcugcggcc

SEQ ID NO: 625 - RNA, 17 nt, Homo sapiens
ggaccgcugcggccugc

SEQ ID NO: 626 - RNA, 17 nt, Homo sapiens
ccgcugcggccugcagg

SEQ ID NO: 627 - RNA, 17 nt, Homo sapiens
ugcggccugcaggagcu

SEQ ID NO: 628 - RNA, 17 nt, Homo sapiens
cugcaggagcugggccc

SEQ ID NO: 629 - RNA, 17 nt, Homo sapiens
ggagcugggcccggggc

SEQ ID NO: 630 - RNA, 17 nt, Homo sapiens
ggcccggggcuguuccg

SEQ ID NO: 631 - RNA, 17 nt, Homo sapiens
ccggggcuguuccgcgg

SEQ ID NO: 632 - RNA, 17 nt, Homo sapiens
gcuguuccgcggccugg

SEQ ID NO: 633 - RNA, 17 nt, Homo sapiens
guuccgcggccuggcug

SEQ ID NO: 634 - RNA, 17 nt, Homo sapiens
gcggccuggcugcccug

SEQ ID NO: 635 - RNA, 17 nt, Homo sapiens
gccuggcugcccugcag

SEQ ID NO: 636 - RNA, 17 nt, Homo sapiens
gcugcccugcaguaccu

SEQ ID NO: 637 - RNA, 17 nt, Homo sapiens
gcccugcaguaccucua

SEQ ID NO: 638 - RNA, 17 nt, Homo sapiens
cucuaccugcaggacaa

SEQ ID NO: 639 - RNA, 17 nt, Homo sapiens
aggacaacgcgcugcag

SEQ ID NO: 640 - RNA, 17 nt, Homo sapiens
gacaacgcgcugcaggc

SEQ ID NO: 641 - RNA, 17 nt, Homo sapiens
aacgcgcugcaggcacu

SEQ ID NO: 642 - RNA, 17 nt, Homo sapiens
cgcugcaggcacugccu

SEQ ID NO: 643 - RNA, 17 nt, Homo sapiens
caggcacugccugauga

SEQ ID NO: 644 - RNA, 17 nt, Homo sapiens
caccuuccgcgaccugg

SEQ ID NO: 645 - RNA, 17 nt, Homo sapiens
cgaccugggcaaccuca

SEQ ID NO: 646 - RNA, 17 nt, Homo sapiens
cucuuccugcacggcaa

SEQ ID NO: 647 - RNA, 17 nt, Homo sapiens
cggcaaccgcaucucca

SEQ ID NO: 648 - RNA, 17 nt, Homo sapiens
caucuccagcgugcccg

SEQ ID NO: 649 - RNA, 17 nt, Homo sapiens
ucuccagcgugcccgag

SEQ ID NO: 650 - RNA, 17 nt, Homo sapiens
uccagcgugcccgagcg

SEQ ID NO: 651 - RNA, 17 nt, Homo sapiens
gugcccgagcgcgccuu

SEQ ID NO: 652 - RNA, 17 nt, Homo sapiens
gcccgagcgcgccuucc

SEQ ID NO: 653 - RNA, 17 nt, Homo sapiens
ccgagcgcgccuuccgu

SEQ ID NO: 654 - RNA, 17 nt, Homo sapiens
cgccuuccgugggcugc

SEQ ID NO: 655 - RNA, 17 nt, Homo sapiens
uuccgugggcugcacag

SEQ ID NO: 656 - RNA, 17 nt, Homo sapiens
cgugggcugcacagccu

SEQ ID NO: 657 - RNA, 17 nt, Homo sapiens
gcugcacagccucgacc

SEQ ID NO: 658 - RNA, 17 nt, Homo sapiens
ccucgaccgucuccuac

SEQ ID NO: 659 - RNA, 17 nt, Homo sapiens
cuccuacugcaccagaa

SEQ ID NO: 660 - RNA, 17 nt, Homo sapiens
ccagaaccgcguggccc

SEQ ID NO: 661 - RNA, 17 nt, Homo sapiens
agaaccgcguggcccau

SEQ ID NO: 662 - RNA, 17 nt, Homo sapiens
accgcguggcccaugug

SEQ ID NO: 663 - RNA, 17 nt, Homo sapiens
uggcccaugugcacccg

SEQ ID NO: 664 - RNA, 17 nt, Homo sapiens
gcccaugugcacccgca

SEQ ID NO: 665 - RNA, 17 nt, Homo sapiens
gugcacccgcaugccuu

SEQ ID NO: 666 - RNA, 17 nt, Homo sapiens
acccgcaugccuuccgu

SEQ ID NO: 667 - RNA, 17 nt, Homo sapiens
ugccuuccgugaccuug

SEQ ID NO: 668 - RNA, 17 nt, Homo sapiens
ugaccuuggccgccuca

SEQ ID NO: 669 - RNA, 17 nt, Homo sapiens
ccuuggccgccucauga

SEQ ID NO: 670 - RNA, 17 nt, Homo sapiens
cucuaucuguuugccaa

SEQ ID NO: 671 - RNA, 17 nt, Homo sapiens
aucuguuugccaacaau

SEQ ID NO: 672 - RNA, 17 nt, Homo sapiens
aucuaucagcgcugccc

SEQ ID NO: 673 - RNA, 17 nt, Homo sapiens
cuaucagcgcugcccac

SEQ ID NO: 674 - RNA, 17 nt, Homo sapiens
ucagcgcugcccacuga

SEQ ID NO: 675 - RNA, 17 nt, Homo sapiens
ccacugaggcccuggcc

SEQ ID NO: 676 - RNA, 17 nt, Homo sapiens
aggcccuggccccccug

SEQ ID NO: 677 - RNA, 17 nt, Homo sapiens
gccccccugcgugcccu

SEQ ID NO: 678 - RNA, 17 nt, Homo sapiens
cccccugcgugcccugc

SEQ ID NO: 679 - RNA, 17 nt, Homo sapiens
cccugcgugcccugcag

SEQ ID NO: 680 - RNA, 17 nt, Homo sapiens
cgugcccugcaguaccu

SEQ ID NO: 681 - RNA, 17 nt, Homo sapiens
gcccugcaguaccugag

SEQ ID NO: 682 - RNA, 17 nt, Homo sapiens
uaccugaggcucaacga

SEQ ID NO: 683 - RNA, 17 nt, Homo sapiens
accccugggugugugac

SEQ ID NO: 684 - RNA, 17 nt, Homo sapiens
cccugggugugugacug

SEQ ID NO: 685 - RNA, 17 nt, Homo sapiens
cugggugugugacugcc

SEQ ID NO: 686 - RNA, 17 nt, Homo sapiens
gugugacugccgggcac

SEQ ID NO: 687 - RNA, 17 nt, Homo sapiens
acugccgggcacgccca

SEQ ID NO: 688 - RNA, 17 nt, Homo sapiens
ccgggcacgcccacucu

SEQ ID NO: 689 - RNA, 17 nt, Homo sapiens
cacucugggccuggcug

SEQ ID NO: 690 - RNA, 17 nt, Homo sapiens
ugggccuggcugcagaa

SEQ ID NO: 691 - RNA, 17 nt, Homo sapiens
gccuggcugcagaaguu

SEQ ID NO: 692 - RNA, 17 nt, Homo sapiens
cugcagaaguuccgcgg

SEQ ID NO: 693 - RNA, 17 nt, Homo sapiens
gaaguuccgcggcuccu

SEQ ID NO: 694 - RNA, 17 nt, Homo sapiens
guuccgcggcuccuccu

SEQ ID NO: 695 - RNA, 17 nt, Homo sapiens
ccuccgaggugcccugc

SEQ ID NO: 696 - RNA, 17 nt, Homo sapiens
uccgaggugcccugcag

SEQ ID NO: 697 - RNA, 17 nt, Homo sapiens
ggugcccugcagccucc

SEQ ID NO: 698 - RNA, 17 nt, Homo sapiens
gcccugcagccucccgc

SEQ ID NO: 699 - RNA, 17 nt, Homo sapiens
agccucccgcaacgccu

SEQ ID NO: 700 - RNA, 17 nt, Homo sapiens
cccgcaacgccuggcug

SEQ ID NO: 701 - RNA, 17 nt, Homo sapiens
aacgccuggcuggccgu

SEQ ID NO: 702 - RNA, 17 nt, Homo sapiens
ccuggcuggccgugacc

SEQ ID NO: 703 - RNA, 17 nt, Homo sapiens
ggcuggccgugaccuca

SEQ ID NO: 704 - RNA, 17 nt, Homo sapiens
ccucaaacgccuagcug

SEQ ID NO: 705 - RNA, 17 nt, Homo sapiens
aacgccuagcugccaau

SEQ ID NO: 706 - RNA, 17 nt, Homo sapiens
gccuagcugccaaugac

SEQ ID NO: 707 - RNA, 17 nt, Homo sapiens
aaugaccugcagggcug

SEQ ID NO: 708 - RNA, 17 nt, Homo sapiens
ccugcagggcugcgcug

SEQ ID NO: 709 - RNA, 17 nt, Homo sapiens
gcagggcugcgcugugg

SEQ ID NO: 710 - RNA, 17 nt, Homo sapiens
agggcugcgcuguggcc

SEQ ID NO: 711 - RNA, 17 nt, Homo sapiens
gcugcgcuguggccacc

SEQ ID NO: 712 - RNA, 17 nt, Homo sapiens
gcgcuguggccaccggc

SEQ ID NO: 713 - RNA, 17 nt, Homo sapiens
ggccaccggcccuuacc

SEQ ID NO: 714 - RNA, 17 nt, Homo sapiens
cuggaccggcagggcca

SEQ ID NO: 715 - RNA, 17 nt, Homo sapiens
ccggcagggccaccgau

SEQ ID NO: 716 - RNA, 17 nt, Homo sapiens
gaugaggagccgcuggg

SEQ ID NO: 717 - RNA, 17 nt, Homo sapiens
gaggagccgcuggggcu

SEQ ID NO: 718 - RNA, 17 nt, Homo sapiens
ccgcuggggcuucccaa

SEQ ID NO: 719 - RNA, 17 nt, Homo sapiens
cuucccaagugcugcca

SEQ ID NO: 720 - RNA, 17 nt, Homo sapiens
ucccaagugcugccagc

SEQ ID NO: 721 - RNA, 17 nt, Homo sapiens
caagugcugccagccag

SEQ ID NO: 722 - RNA, 17 nt, Homo sapiens
ugcugccagccagaugc

SEQ ID NO: 723 - RNA, 17 nt, Homo sapiens
agccagaugccgcugac

SEQ ID NO: 724 - RNA, 17 nt, Homo sapiens
cagaugccgcugacaag

SEQ ID NO: 725 - RNA, 17 nt, Homo sapiens
cugacaaggccucagua

SEQ ID NO: 726 - RNA, 17 nt, Homo sapiens
aggccucaguacuggag

SEQ ID NO: 727 - RNA, 17 nt, Homo sapiens
guacuggagccuggaag

SEQ ID NO: 728 - RNA, 17 nt, Homo sapiens
gaagaccagcuucggca

SEQ ID NO: 729 - RNA, 17 nt, Homo sapiens
cagcuucggcaggcaau

SEQ ID NO: 730 - RNA, 17 nt, Homo sapiens
uucggcaggcaaugcgc

SEQ ID NO: 731 - RNA, 17 nt, Homo sapiens
caggcaaugcgcugaag

SEQ ID NO: 732 - RNA, 17 nt, Homo sapiens
ggcaaugcgcugaaggg

SEQ ID NO: 733 - RNA, 17 nt, Homo sapiens
gaagggacgcgugccgc

SEQ ID NO: 734 - RNA, 17 nt, Homo sapiens
agggacgcgugccgccc

SEQ ID NO: 735 - RNA, 17 nt, Homo sapiens
ggacgcgugccgcccgg

SEQ ID NO: 736 - RNA, 17 nt, Homo sapiens
cgcgugccgcccgguga

SEQ ID NO: 737 - RNA, 17 nt, Homo sapiens
gccgcccggugacagcc

SEQ ID NO: 738 - RNA, 17 nt, Homo sapiens
cggugacagcccgccgg

SEQ ID NO: 739 - RNA, 17 nt, Homo sapiens
gacagcccgccgggcaa

SEQ ID NO: 740 - RNA, 17 nt, Homo sapiens
cccgccgggcaacggcu

SEQ ID NO: 741 - RNA, 17 nt, Homo sapiens
gggcaacggcucuggcc

SEQ ID NO: 742 - RNA, 17 nt, Homo sapiens
cggcucuggcccacggc

SEQ ID NO: 743 - RNA, 17 nt, Homo sapiens
ggcccacggcacaucaa

SEQ ID NO: 744 - RNA, 17 nt, Homo sapiens
gggacucugccuggcuc

SEQ ID NO: 745 - RNA, 17 nt, Homo sapiens
ucugccuggcucugcug

SEQ ID NO: 746 - RNA, 17 nt, Homo sapiens
cuggcucugcugagccc

SEQ ID NO: 747 - RNA, 17 nt, Homo sapiens
ucugcugagcccccgcu

SEQ ID NO: 748 - RNA, 17 nt, Homo sapiens
gagcccccgcucacugc

SEQ ID NO: 749 - RNA, 17 nt, Homo sapiens
cgcucacugcagugcgg

SEQ ID NO: 750 - RNA, 17 nt, Homo sapiens
ucacugcagugcggccc

SEQ ID NO: 751 - RNA, 17 nt, Homo sapiens
acugcagugcggcccga

SEQ ID NO: 752 - RNA, 17 nt, Homo sapiens
gcagugcggcccgaggg

SEQ ID NO: 753 - RNA, 17 nt, Homo sapiens
gcccgagggcuccgagc

SEQ ID NO: 754 - RNA, 17 nt, Homo sapiens
ggcuccgagccaccagg

SEQ ID NO: 755 - RNA, 17 nt, Homo sapiens
ccaccaggguuccccac

SEQ ID NO: 756 - RNA, 17 nt, Homo sapiens
caccucgggcccucgcc

SEQ ID NO: 757 - RNA, 17 nt, Homo sapiens
gggcccucgccggaggc

SEQ ID NO: 758 - RNA, 17 nt, Homo sapiens
cgccggaggccaggcug

SEQ ID NO: 759 - RNA, 17 nt, Homo sapiens
gaggccaggcuguucac

SEQ ID NO: 760 - RNA, 17 nt, Homo sapiens
gccaggcuguucacgca

SEQ ID NO: 761 - RNA, 17 nt, Homo sapiens
cuguucacgcaagaacc

SEQ ID NO: 762 - RNA, 17 nt, Homo sapiens
caagaaccgcacccgca

SEQ ID NO: 763 - RNA, 17 nt, Homo sapiens
ccgcacccgcagccacu

SEQ ID NO: 764 - RNA, 17 nt, Homo sapiens
cacccgcagccacugcc

SEQ ID NO: 765 - RNA, 17 nt, Homo sapiens
cagccacugccgucugg

SEQ ID NO: 766 - RNA, 17 nt, Homo sapiens
ccacugccgucugggcc

SEQ ID NO: 767 - RNA, 17 nt, Homo sapiens
ccgucugggccaggcag

SEQ ID NO: 768 - RNA, 17 nt, Homo sapiens
ugggccaggcaggcagc

SEQ ID NO: 769 - RNA, 17 nt, Homo sapiens
ccaggcaggcagcgggg

SEQ ID NO: 770 - RNA, 17 nt, Homo sapiens
ggcaggcagcgggggug

SEQ ID NO: 771 - RNA, 17 nt, Homo sapiens
cagcggggguggcggga

SEQ ID NO: 772 - RNA, 17 nt, Homo sapiens
cggggguggcgggacug

SEQ ID NO: 773 - RNA, 17 nt, Homo sapiens
cgggacuggugacucag

SEQ ID NO: 774 - RNA, 17 nt, Homo sapiens
cucagaaggcucaggug

SEQ ID NO: 775 - RNA, 17 nt, Homo sapiens
aggcucaggugcccuac

SEQ ID NO: 776 - RNA, 17 nt, Homo sapiens
gcucaggugcccuaccc

SEQ ID NO: 777 - RNA, 17 nt, Homo sapiens
ccuacccagccucaccu

SEQ ID NO: 778 - RNA, 17 nt, Homo sapiens
ccucaccugcagccuca

SEQ ID NO: 779 - RNA, 17 nt, Homo sapiens
caccugcagccucaccc

SEQ ID NO: 780 - RNA, 17 nt, Homo sapiens
cccccugggccuggcgc

SEQ ID NO: 781 - RNA, 17 nt, Homo sapiens
ugggccuggcgcuggug

SEQ ID NO: 782 - RNA, 17 nt, Homo sapiens
ggccuggcgcuggugcu

SEQ ID NO: 783 - RNA, 17 nt, Homo sapiens
uggcgcuggugcugugg

SEQ ID NO: 784 - RNA, 17 nt, Homo sapiens
gcgcuggugcuguggac

SEQ ID NO: 785 - RNA, 17 nt, Homo sapiens
cuggugcuguggacagu

SEQ ID NO: 786 - RNA, 17 nt, Homo sapiens
uguggacagugcuuggg

SEQ ID NO: 787 - RNA, 17 nt, Homo sapiens
uggacagugcuugggcc

SEQ ID NO: 788 - RNA, 17 nt, Homo sapiens
gugcuugggcccugcug

SEQ ID NO: 789 - RNA, 17 nt, Homo sapiens
ugggcccugcugacccc

SEQ ID NO: 790 - RNA, 17 nt, Homo sapiens
ccccuacgaugaagagg

SEQ ID NO: 791 - RNA, 17 nt, Homo sapiens
augcuacaaugagccca

SEQ ID NO: 792 - RNA, 17 nt, Homo sapiens
ccaaggugacgacaagc

SEQ ID NO: 793 - RNA, 17 nt, Homo sapiens
aggugacgacaagcugc

SEQ ID NO: 794 - RNA, 17 nt, Homo sapiens
gcacggcaaccgcaucu

SEQ ID NO: 795 - RNA, 17 nt, Homo sapiens
cugccgcaaccucacca

SEQ ID NO: 796 - RNA, 17 nt, Homo sapiens
gcacucgaaugugcugg

SEQ ID NO: 797 - RNA, 17 nt, Homo sapiens
uggcccgaauugaugcg

SEQ ID NO: 798 - RNA, 17 nt, Homo sapiens
ccgaauugaugcggcug

SEQ ID NO: 799 - RNA, 17 nt, Homo sapiens
gcagcuggaccucagcg

SEQ ID NO: 800 - RNA, 17 nt, Homo sapiens
ccucagcgauaaugcac

SEQ ID NO: 801 - RNA, 17 nt, Homo sapiens
cagcgauaaugcacagc

SEQ ID NO: 802 - RNA, 17 nt, Homo sapiens
gucuguggacccugcca

SEQ ID NO: 803 - RNA, 17 nt, Homo sapiens
gcaccuggaccgcugcg

SEQ ID NO: 804 - RNA, 17 nt, Homo sapiens
ccugcaggacaacgcgc

SEQ ID NO: 805 - RNA, 17 nt, Homo sapiens
gcaggacaacgcgcugc

SEQ ID NO: 806 - RNA, 17 nt, Homo sapiens
acugccugaugacaccu

SEQ ID NO: 807 - RNA, 17 nt, Homo sapiens
gccugaugacaccuucc

SEQ ID NO: 808 - RNA, 17 nt, Homo sapiens
cuuccgcgaccugggca

SEQ ID NO: 809 - RNA, 17 nt, Homo sapiens
ccugggcaaccucacac

SEQ ID NO: 810 - RNA, 17 nt, Homo sapiens
cagccucgaccgucucc

SEQ ID NO: 811 - RNA, 17 nt, Homo sapiens
gcaccagaaccgcgugg

SEQ ID NO: 812 - RNA, 17 nt, Homo sapiens
cuuccgugaccuuggcc

SEQ ID NO: 813 - RNA, 17 nt, Homo sapiens
gccucaugacacucuau

SEQ ID NO: 814 - RNA, 17 nt, Homo sapiens
guuugccaacaaucuau

SEQ ID NO: 815 - RNA, 17 nt, Homo sapiens
ugccaacaaucuaucag

SEQ ID NO: 816 - RNA, 17 nt, Homo sapiens
gaggcucaacgacaacc

SEQ ID NO: 817 - RNA, 17 nt, Homo sapiens
gcucaacgacaaccccu

SEQ ID NO: 818 - RNA, 17 nt, Homo sapiens
caacgacaaccccuggg

SEQ ID NO: 819 - RNA, 17 nt, Homo sapiens
ggugugugacugccggg

SEQ ID NO: 820 - RNA, 17 nt, Homo sapiens
cucccgcaacgccuggc

SEQ ID NO: 821 - RNA, 17 nt, Homo sapiens
uggccgugaccucaaac

SEQ ID NO: 822 - RNA, 17 nt, Homo sapiens
gaccucaaacgccuagc

SEQ ID NO: 823 - RNA, 17 nt, Homo sapiens
agcugccaaugaccugc

SEQ ID NO: 824 - RNA, 17 nt, Homo sapiens
ugccaaugaccugcagg

SEQ ID NO: 825 - RNA, 17 nt, Homo sapiens
ccaucuggaccggcagg

SEQ ID NO: 826 - RNA, 17 nt, Homo sapiens
ggccaccgaugaggagc

SEQ ID NO: 827 - RNA, 17 nt, Homo sapiens
ccagccagaugccgcug

SEQ ID NO: 828 - RNA, 17 nt, Homo sapiens
ugccgcugacaaggccu

SEQ ID NO: 829 - RNA, 17 nt, Homo sapiens
ccuggaagaccagcuuc

SEQ ID NO: 830 - RNA, 17 nt, Homo sapiens
ggcaggcaaugcgcuga

SEQ ID NO: 831 - RNA, 17 nt, Homo sapiens
cugaagggacgcgugcc

SEQ ID NO: 832 - RNA, 17 nt, Homo sapiens
gcccggugacagcccgc

SEQ ID NO: 833 - RNA, 17 nt, Homo sapiens
gccgggcaacggcucug

SEQ ID NO: 834 - RNA, 17 nt, Homo sapiens
gcacaucaaugacucac

SEQ ID NO: 835 - RNA, 17 nt, Homo sapiens
caucaaugacucacccu

SEQ ID NO: 836 - RNA, 17 nt, Homo sapiens
ccuuugggacucugccu

SEQ ID NO: 837 - RNA, 17 nt, Homo sapiens
acgcaagaaccgcaccc

SEQ ID NO: 838 - RNA, 17 nt, Homo sapiens
guggcgggacuggugac

SEQ ID NO: 839 - RNA, 17 nt, Homo sapiens
gacuggugacucagaag

SEQ ID NO: 840 - RNA, 17 nt, Homo sapiens
ugcuguggacagugcuu

SEQ ID NO: 841 - RNA, 17 nt, Homo sapiens
accccuacgaugaagag

SEQ ID NO: 842 - RNA, 17 nt, Homo sapiens
ccuacgaugaagagggc

SEQ ID NO: 843 - RNA, 17 nt, Homo sapiens
acgaugaagagggcguc

SEQ ID NO: 844 - RNA, 17 nt, Homo sapiens
gaugaagagggcguccg

SEQ ID NO: 845 - RNA, 17 nt, Homo sapiens
augaagagggcguccgc

SEQ ID NO: 846 - RNA, 17 nt, Homo sapiens
cguccgcuggagggagc

SEQ ID NO: 847 - RNA, 17 nt, Homo sapiens
guccgcuggagggagcc

SEQ ID NO: 848 - RNA, 17 nt, Homo sapiens
ccgcuggagggagccgg

SEQ ID NO: 849 - RNA, 17 nt, Homo sapiens
cgcuggagggagccggc

SEQ ID NO: 850 - RNA, 17 nt, Homo sapiens
gcuggagggagccggcu

SEQ ID NO: 851 - RNA, 17 nt, Homo sapiens
agggagccggcugcugg

SEQ ID NO: 852 - RNA, 17 nt, Homo sapiens
cggcugcuggcaugggu

SEQ ID NO: 853 - RNA, 17 nt, Homo sapiens
gcuggcaugggugcugu

SEQ ID NO: 854 - RNA, 17 nt, Homo sapiens
cuggcaugggugcugug

SEQ ID NO: 855 - RNA, 17 nt, Homo sapiens
ggugcuguggcugcagg

SEQ ID NO: 856 - RNA, 17 nt, Homo sapiens
uggcugcaggccuggca

SEQ ID NO: 857 - RNA, 17 nt, Homo sapiens
gcaggccuggcaggugg

SEQ ID NO: 858 - RNA, 17 nt, Homo sapiens
gccuggcagguggcagc

SEQ ID NO: 859 - RNA, 17 nt, Homo sapiens
uggcagguggcagcccc

SEQ ID NO: 860 - RNA, 17 nt, Homo sapiens
caugcccaggugccugc

SEQ ID NO: 861 - RNA, 17 nt, Homo sapiens
gcuacaaugagcccaag

SEQ ID NO: 862 - RNA, 17 nt, Homo sapiens
gagcccaaggugacgac

SEQ ID NO: 863 - RNA, 17 nt, Homo sapiens
cccaaggugacgacaag

SEQ ID NO: 864 - RNA, 17 nt, Homo sapiens
aaggugacgacaagcug

SEQ ID NO: 865 - RNA, 17 nt, Homo sapiens
ccccagcagggccugca

SEQ ID NO: 866 - RNA, 17 nt, Homo sapiens
cccagcagggccugcag

SEQ ID NO: 867 - RNA, 17 nt, Homo sapiens
ggccugcaggcugugcc

SEQ ID NO: 868 - RNA, 17 nt, Homo sapiens
gugcccgugggcauccc

SEQ ID NO: 869 - RNA, 17 nt, Homo sapiens
ugcccgugggcaucccu

SEQ ID NO: 870 - RNA, 17 nt, Homo sapiens
uccugcacggcaaccgc

SEQ ID NO: 871 - RNA, 17 nt, Homo sapiens
cauccuguggcugcacu

SEQ ID NO: 872 - RNA, 17 nt, Homo sapiens
cugcacucgaaugugcu

SEQ ID NO: 873 - RNA, 17 nt, Homo sapiens
aaugugcuggcccgaau

SEQ ID NO: 874 - RNA, 17 nt, Homo sapiens
gcuggcccgaauugaug

SEQ ID NO: 875 - RNA, 17 nt, Homo sapiens
cccgaauugaugcggcu

SEQ ID NO: 876 - RNA, 17 nt, Homo sapiens
auugaugcggcugccuu

SEQ ID NO: 877 - RNA, 17 nt, Homo sapiens
ccuucacuggccuggcc

SEQ ID NO: 878 - RNA, 17 nt, Homo sapiens
acuggccuggcccuccu

SEQ ID NO: 879 - RNA, 17 nt, Homo sapiens
gcccuccuggagcagcu

SEQ ID NO: 880 - RNA, 17 nt, Homo sapiens
cccuccuggagcagcug

SEQ ID NO: 881 - RNA, 17 nt, Homo sapiens
gagcagcuggaccucag

SEQ ID NO: 882 - RNA, 17 nt, Homo sapiens
agcagcuggaccucagc

SEQ ID NO: 883 - RNA, 17 nt, Homo sapiens
accucagcgauaaugca

SEQ ID NO: 884 - RNA, 17 nt, Homo sapiens
acagcuccggucugugg

SEQ ID NO: 885 - RNA, 17 nt, Homo sapiens
cggucuguggacccugc

SEQ ID NO: 886 - RNA, 17 nt, Homo sapiens
ggucuguggacccugcc

SEQ ID NO: 887 - RNA, 17 nt, Homo sapiens
cauuccacggccugggc

SEQ ID NO: 888 - RNA, 17 nt, Homo sapiens
cacggccugggccgccu

SEQ ID NO: 889 - RNA, 17 nt, Homo sapiens
acggccugggccgccua

SEQ ID NO: 890 - RNA, 17 nt, Homo sapiens
cugcaccuggaccgcug

SEQ ID NO: 891 - RNA, 17 nt, Homo sapiens
ugcaccuggaccgcugc

SEQ ID NO: 892 - RNA, 17 nt, Homo sapiens
accgcugcggccugcag

SEQ ID NO: 893 - RNA, 17 nt, Homo sapiens
ggccugcaggagcuggg

SEQ ID NO: 894 - RNA, 17 nt, Homo sapiens
gccugcaggagcugggc

SEQ ID NO: 895 - RNA, 17 nt, Homo sapiens
caggagcugggcccggg

SEQ ID NO: 896 - RNA, 17 nt, Homo sapiens
aggagcugggcccgggg

SEQ ID NO: 897 - RNA, 17 nt, Homo sapiens
cugggcccggggcuguu

SEQ ID NO: 898 - RNA, 17 nt, Homo sapiens
ugggcccggggcuguuc

SEQ ID NO: 899 - RNA, 17 nt, Homo sapiens
gggcccggggcuguucc

SEQ ID NO: 900 - RNA, 17 nt, Homo sapiens
uguuccgcggccuggcu

SEQ ID NO: 901 - RNA, 17 nt, Homo sapiens
cgcggccuggcugcccu

SEQ ID NO: 902 - RNA, 17 nt, Homo sapiens
uaccugcaggacaacgc

SEQ ID NO: 903 - RNA, 17 nt, Homo sapiens
accugcaggacaacgcg

SEQ ID NO: 904 - RNA, 17 nt, Homo sapiens
gcgcugcaggcacugcc

SEQ ID NO: 905 - RNA, 17 nt, Homo sapiens
cacugccugaugacacc

SEQ ID NO: 906 - RNA, 17 nt, Homo sapiens
ugccugaugacaccuuc

SEQ ID NO: 907 - RNA, 17 nt, Homo sapiens
ccuuccgcgaccugggc

SEQ ID NO: 908 - RNA, 17 nt, Homo sapiens
cgcgaccugggcaaccu

SEQ ID NO: 909 - RNA, 17 nt, Homo sapiens
gcgaccugggcaaccuc

SEQ ID NO: 910 - RNA, 17 nt, Homo sapiens
gcgugcccgagcgcgcc

SEQ ID NO: 911 - RNA, 17 nt, Homo sapiens
ccuuccgugggcugcac

SEQ ID NO: 912 - RNA, 17 nt, Homo sapiens
cuuccgugggcugcaca

SEQ ID NO: 913 - RNA, 17 nt, Homo sapiens
acagccucgaccgucuc

SEQ ID NO: 914 - RNA, 17 nt, Homo sapiens
cugcaccagaaccgcgu

SEQ ID NO: 915 - RNA, 17 nt, Homo sapiens
aaccgcguggcccaugu

SEQ ID NO: 916 - RNA, 17 nt, Homo sapiens
ccuuccgugaccuuggc

SEQ ID NO: 917 - RNA, 17 nt, Homo sapiens
gugaccuuggccgccuc

SEQ ID NO: 918 - RNA, 17 nt, Homo sapiens
cgccucaugacacucua

SEQ ID NO: 919 - RNA, 17 nt, Homo sapiens
ugcccacugaggcccug

SEQ ID NO: 920 - RNA, 17 nt, Homo sapiens
cccacugaggcccuggc

SEQ ID NO: 921 - RNA, 17 nt, Homo sapiens
gaggcccuggccccccu

SEQ ID NO: 922 - RNA, 17 nt, Homo sapiens
caguaccugaggcucaa

SEQ ID NO: 923 - RNA, 17 nt, Homo sapiens
guaccugaggcucaacg

SEQ ID NO: 924 - RNA, 17 nt, Homo sapiens
ggcucaacgacaacccc

SEQ ID NO: 925 - RNA, 17 nt, Homo sapiens
caaccccugggugugug

SEQ ID NO: 926 - RNA, 17 nt, Homo sapiens
aaccccuggguguguga

SEQ ID NO: 927 - RNA, 17 nt, Homo sapiens
gggugugugacugccgg

SEQ ID NO: 928 - RNA, 17 nt, Homo sapiens
ugacugccgggcacgcc

SEQ ID NO: 929 - RNA, 17 nt, Homo sapiens
gacugccgggcacgccc

SEQ ID NO: 930 - RNA, 17 nt, Homo sapiens
cccacucugggccuggc

SEQ ID NO: 931 - RNA, 17 nt, Homo sapiens
ccacucugggccuggcu

SEQ ID NO: 932 - RNA, 17 nt, Homo sapiens
cugggccuggcugcaga

SEQ ID NO: 933 - RNA, 17 nt, Homo sapiens
uggcugcagaaguuccg

SEQ ID NO: 934 - RNA, 17 nt, Homo sapiens
aguuccgcggcuccucc

SEQ ID NO: 935 - RNA, 17 nt, Homo sapiens
ccuccuccgaggugccc

SEQ ID NO: 936 - RNA, 17 nt, Homo sapiens
uccuccgaggugcccug

SEQ ID NO: 937 - RNA, 17 nt, Homo sapiens
caacgccuggcuggccg

SEQ ID NO: 938 - RNA, 17 nt, Homo sapiens
gccuggcuggccgugac

SEQ ID NO: 939 - RNA, 17 nt, Homo sapiens
cuggccgugaccucaaa

SEQ ID NO: 940 - RNA, 17 nt, Homo sapiens
cugccaaugaccugcag

SEQ ID NO: 941 - RNA, 17 nt, Homo sapiens
gaccugcagggcugcgc

SEQ ID NO: 942 - RNA, 17 nt, Homo sapiens
accugcagggcugcgcu

SEQ ID NO: 943 - RNA, 17 nt, Homo sapiens
ugcgcuguggccaccgg

SEQ ID NO: 944 - RNA, 17 nt, Homo sapiens
uggccaccggcccuuac

SEQ ID NO: 945 - RNA, 17 nt, Homo sapiens
ucccaucuggaccggca

SEQ ID NO: 946 - RNA, 17 nt, Homo sapiens
cccaucuggaccggcag

SEQ ID NO: 947 - RNA, 17 nt, Homo sapiens
ucuggaccggcagggcc

SEQ ID NO: 948 - RNA, 17 nt, Homo sapiens
gaccggcagggccaccg

SEQ ID NO: 949 - RNA, 17 nt, Homo sapiens
accggcagggccaccga

SEQ ID NO: 950 - RNA, 17 nt, Homo sapiens
gggccaccgaugaggag

SEQ ID NO: 951 - RNA, 17 nt, Homo sapiens
ccaccgaugaggagccg

SEQ ID NO: 952 - RNA, 17 nt, Homo sapiens
accgaugaggagccgcu

SEQ ID NO: 953 - RNA, 17 nt, Homo sapiens
ccgaugaggagccgcug

SEQ ID NO: 954 - RNA, 17 nt, Homo sapiens
gagccgcuggggcuucc

SEQ ID NO: 955 - RNA, 17 nt, Homo sapiens
agccgcuggggcuuccc

SEQ ID NO: 956 - RNA, 17 nt, Homo sapiens
gccgcuggggcuuccca

SEQ ID NO: 957 - RNA, 17 nt, Homo sapiens
gccagccagaugccgcu

SEQ ID NO: 958 - RNA, 17 nt, Homo sapiens
augccgcugacaaggcc

SEQ ID NO: 959 - RNA, 17 nt, Homo sapiens
gcugacaaggccucagu

SEQ ID NO: 960 - RNA, 17 nt, Homo sapiens
ucaguacuggagccugg

SEQ ID NO: 961 - RNA, 17 nt, Homo sapiens
caguacuggagccugga

SEQ ID NO: 962 - RNA, 17 nt, Homo sapiens
uggagccuggaagacca

SEQ ID NO: 963 - RNA, 17 nt, Homo sapiens
ggagccuggaagaccag

SEQ ID NO: 964 - RNA, 17 nt, Homo sapiens
gccuggaagaccagcuu

SEQ ID NO: 965 - RNA, 17 nt, Homo sapiens
ccagcuucggcaggcaa

SEQ ID NO: 966 - RNA, 17 nt, Homo sapiens
cuucggcaggcaaugcg

SEQ ID NO: 967 - RNA, 17 nt, Homo sapiens
aaugcgcugaagggacg

SEQ ID NO: 968 - RNA, 17 nt, Homo sapiens
gcgcugaagggacgcgu

SEQ ID NO: 969 - RNA, 17 nt, Homo sapiens
cgcugaagggacgcgug

SEQ ID NO: 970 - RNA, 17 nt, Homo sapiens
gcugaagggacgcgugc

SEQ ID NO: 971 - RNA, 17 nt, Homo sapiens
ugccgcccggugacagc

SEQ ID NO: 972 - RNA, 17 nt, Homo sapiens
cgcccggugacagcccg

SEQ ID NO: 973 - RNA, 17 nt, Homo sapiens
agcccgccgggcaacgg

SEQ ID NO: 974 - RNA, 17 nt, Homo sapiens
gcccgccgggcaacggc

SEQ ID NO: 975 - RNA, 17 nt, Homo sapiens
cgggcaacggcucuggc

SEQ ID NO: 976 - RNA, 17 nt, Homo sapiens
acggcucuggcccacgg

SEQ ID NO: 977 - RNA, 17 nt, Homo sapiens
uggcccacggcacauca

SEQ ID NO: 978 - RNA, 17 nt, Homo sapiens
acaucaaugacucaccc

SEQ ID NO: 979 - RNA, 17 nt, Homo sapiens
cacccuuugggacucug

SEQ ID NO: 980 - RNA, 17 nt, Homo sapiens
acccuuugggacucugc

SEQ ID NO: 981 - RNA, 17 nt, Homo sapiens
cccuuugggacucugcc

SEQ ID NO: 982 - RNA, 17 nt, Homo sapiens
cucugccuggcucugcu

SEQ ID NO: 983 - RNA, 17 nt, Homo sapiens
gcucugcugagcccccg

SEQ ID NO: 984 - RNA, 17 nt, Homo sapiens
ugcagugcggcccgagg

SEQ ID NO: 985 - RNA, 17 nt, Homo sapiens
ugcggcccgagggcucc

SEQ ID NO: 986 - RNA, 17 nt, Homo sapiens
cggcccgagggcuccga

SEQ ID NO: 987 - RNA, 17 nt, Homo sapiens
ggcccgagggcuccgag

SEQ ID NO: 988 - RNA, 17 nt, Homo sapiens
agggcuccgagccacca

SEQ ID NO: 989 - RNA, 17 nt, Homo sapiens
agccaccaggguucccc

SEQ ID NO: 990 - RNA, 17 nt, Homo sapiens
gccaccaggguucccca

SEQ ID NO: 991 - RNA, 17 nt, Homo sapiens
cccaccucgggcccucg

SEQ ID NO: 992 - RNA, 17 nt, Homo sapiens
ccaccucgggcccucgc

SEQ ID NO: 993 - RNA, 17 nt, Homo sapiens
cccucgccggaggccag

SEQ ID NO: 994 - RNA, 17 nt, Homo sapiens
ccucgccggaggccagg

SEQ ID NO: 995 - RNA, 17 nt, Homo sapiens
ucgccggaggccaggcu

SEQ ID NO: 996 - RNA, 17 nt, Homo sapiens
ggaggccaggcuguuca

SEQ ID NO: 997 - RNA, 17 nt, Homo sapiens
ucacgcaagaaccgcac

SEQ ID NO: 998 - RNA, 17 nt, Homo sapiens
ugccgucugggccaggc

SEQ ID NO: 999 - RNA, 17 nt, Homo sapiens
gccgucugggccaggca

SEQ ID NO: 1000 - RNA, 17 nt, Homo sapiens
cugggccaggcaggcag

SEQ ID NO: 1001 - RNA, 17 nt, Homo sapiens
gccaggcaggcagcggg

SEQ ID NO: 1002 - RNA, 17 nt, Homo sapiens
caggcagcggggguggc

SEQ ID NO: 1003 - RNA, 17 nt, Homo sapiens
aggcagcggggguggcg

SEQ ID NO: 1004 - RNA, 17 nt, Homo sapiens
ggcagcggggguggcgg

SEQ ID NO: 1005 - RNA, 17 nt, Homo sapiens
gcagcggggguggcggg

SEQ ID NO: 1006 - RNA, 17 nt, Homo sapiens
gcggggguggcgggacu

SEQ ID NO: 1007 - RNA, 17 nt, Homo sapiens
gggguggcgggacuggu

SEQ ID NO: 1008 - RNA, 17 nt, Homo sapiens
ggguggcgggacuggug

SEQ ID NO: 1009 - RNA, 17 nt, Homo sapiens
gguggcgggacugguga

SEQ ID NO: 1010 - RNA, 17 nt, Homo sapiens
gcgggacuggugacuca

SEQ ID NO: 1011 - RNA, 17 nt, Homo sapiens
ggacuggugacucagaa

SEQ ID NO: 1012 - RNA, 17 nt, Homo sapiens
gugacucagaaggcuca

SEQ ID NO: 1013 - RNA, 17 nt, Homo sapiens
acucagaaggcucaggu

SEQ ID NO: 1014 - RNA, 17 nt, Homo sapiens
aaggcucaggugcccua

SEQ ID NO: 1015 - RNA, 17 nt, Homo sapiens
accccccugggccuggc

SEQ ID NO: 1016 - RNA, 17 nt, Homo sapiens
ccccccugggccuggcg

SEQ ID NO: 1017 - RNA, 17 nt, Homo sapiens
cugggccuggcgcuggu

SEQ ID NO: 1018 - RNA, 17 nt, Homo sapiens
cuggcgcuggugcugug

SEQ ID NO: 1019 - RNA, 17 nt, Homo sapiens
ggugcuguggacagugc

SEQ ID NO: 1020 - RNA, 17 nt, Homo sapiens
gugcuguggacagugcu

SEQ ID NO: 1021 - RNA, 17 nt, Homo sapiens
cagugcuugggcccugc

SEQ ID NO: 1022 - RNA, 17 nt, Homo sapiens
agugcuugggcccugcu

SEQ ID NO: 1023 - RNA, 17 nt, Homo sapiens
gcccugcugacccccag

SEQ ID NO: 1024 - RNA, 17 nt, Artificial Sequence
  Description of Artificial Sequence:  Enzymatic Nucleic Acid
auggcccuugugaucca

SEQ ID NO: 1025 - RNA, 17 nt, Artificial Sequence
  Description of Artificial Sequence:  Enzymatic Nucleic Acid
cuugugauccagguggg

SEQ ID NO: 1026 - RNA, 17 nt, Artificial Sequence
  Description of Artificial Sequence:  Enzymatic Nucleic Acid
gggaaacuaaggcccag

SEQ ID NO: 1027 - RNA, 17 nt, Artificial Sequence
  Description of Artificial Sequence:  Enzymatic Nucleic Acid
cgcagacuaucaauccc

SEQ ID NO: 1028 - RNA, 17 nt, Artificial Sequence
  Description of Artificial Sequence:  Enzymatic Nucleic Acid
cagacuaucaaucccag

SEQ ID NO: 1029 - RNA, 17 nt, Artificial Sequence
  Description of Artificial Sequence:  Enzymatic Nucleic Acid
cuaucaaucccagucuc

SEQ ID NO: 1030 - RNA, 17 nt, Artificial Sequence
  Description of Artificial Sequence:  Enzymatic Nucleic Acid
aucccagucucuucccc

SEQ ID NO: 1031 - RNA, 17 nt, Artificial Sequence
  Description of Artificial Sequence:  Enzymatic Nucleic Acid
cccagucucuuccccuc

SEQ ID NO: 1032 - RNA, 17 nt, Artificial Sequence
  Description of Artificial Sequence:  Enzymatic Nucleic Acid
cagucucuuccccucac

SEQ ID NO: 1033 - RNA, 17 nt, Artificial Sequence
  Description of Artificial Sequence:  Enzymatic Nucleic Acid
agucucuuccccucacu

SEQ ID NO: 1034 - RNA, 17 nt, Artificial Sequence
  Description of Artificial Sequence:  Enzymatic Nucleic Acid
cuuccccucacucccug

SEQ ID NO: 1035 - RNA, 17 nt, Artificial Sequence
  Description of Artificial Sequence:  Enzymatic Nucleic Acid
cccucacucccugugaa

SEQ ID NO: 1036 - RNA, 17 nt, Artificial Sequence
  Description of Artificial Sequence:  Enzymatic Nucleic Acid
gugaagcucuccagcau

SEQ ID NO: 1037 - RNA, 17 nt, Artificial Sequence
  Description of Artificial Sequence:  Enzymatic Nucleic Acid
gaagcucuccagcauca

SEQ ID NO: 1038 - RNA, 17 nt, Artificial Sequence
  Description of Artificial Sequence:  Enzymatic Nucleic Acid
uccagcaucaucgaggu

SEQ ID NO: 1039 - RNA, 17 nt, Artificial Sequence
  Description of Artificial Sequence:  Enzymatic Nucleic Acid
agcaucaucgagguccc

SEQ ID NO: 1040 - RNA, 17 nt, Artificial Sequence
  Description of Artificial Sequence:  Enzymatic Nucleic Acid
aucgaggucccaucagc

SEQ ID NO: 1041 - RNA, 17 nt, Artificial Sequence
  Description of Artificial Sequence:  Enzymatic Nucleic Acid
ggucccaucagcccuug

SEQ ID NO: 1042 - RNA, 17 nt, Artificial Sequence
  Description of Artificial Sequence:  Enzymatic Nucleic Acid
ucagcccuugcccuguu

SEQ ID NO: 1043 - RNA, 17 nt, Artificial Sequence
  Description of Artificial Sequence:  Enzymatic Nucleic Acid
ugcccuguuggaugaau

SEQ ID NO: 1044 - RNA, 17 nt, Artificial Sequence
  Description of Artificial Sequence:  Enzymatic Nucleic Acid
ggaugaauaggcaccuc

SEQ ID NO: 1045 - RNA, 17 nt, Artificial Sequence
  Description of Artificial Sequence:  Enzymatic Nucleic Acid
aggcaccucuggaagag

SEQ ID NO: 1046 - RNA, 17 nt, Artificial Sequence
  Description of Artificial Sequence:  Enzymatic Nucleic Acid
cagcagaucaggacgua

SEQ ID NO: 1047 - RNA, 17 nt, Artificial Sequence
  Description of Artificial Sequence:  Enzymatic Nucleic Acid
caggacguacugggcga

SEQ ID NO: 1048 - RNA, 17 nt, Artificial Sequence
  Description of Artificial Sequence:  Enzymatic Nucleic Acid
cgaagagucuccucugg

SEQ ID NO: 1049 - RNA, 17 nt, Artificial Sequence
  Description of Artificial Sequence:  Enzymatic Nucleic Acid
aagagucuccucugggg

SEQ ID NO: 1050 - RNA, 17 nt, Artificial Sequence
  Description of Artificial Sequence:  Enzymatic Nucleic Acid
agucuccucuggggaag

SEQ ID NO: 1051 - RNA, 17 nt, Artificial Sequence
  Description of Artificial Sequence:  Enzymatic Nucleic Acid
accugccuucagaacag

SEQ ID NO: 1052 - RNA, 17 nt, Artificial Sequence
  Description of Artificial Sequence:  Enzymatic Nucleic Acid
ccugccuucagaacagg

SEQ ID NO: 1053 - RNA, 17 nt, Artificial Sequence
  Description of Artificial Sequence:  Enzymatic Nucleic Acid
agggcgcuccugagacc

SEQ ID NO: 1054 - RNA, 17 nt, Artificial Sequence
  Description of Artificial Sequence:  Enzymatic Nucleic Acid
gagacccuccagcgcug

SEQ ID NO: 1055 - RNA, 17 nt, Artificial Sequence
  Description of Artificial Sequence:  Enzymatic Nucleic Acid
aggagaaucaagagcuc

SEQ ID NO: 1056 - RNA, 17 nt, Artificial Sequence
  Description of Artificial Sequence:  Enzymatic Nucleic Acid
caagagcuccgagaugc

SEQ ID NO: 1057 - RNA, 17 nt, Artificial Sequence
  Description of Artificial Sequence:  Enzymatic Nucleic Acid
gaugccauccggcagag

SEQ ID NO: 1058 - RNA, 17 nt, Artificial Sequence
  Description of Artificial Sequence:  Enzymatic Nucleic Acid
aaccagauucugcggga

SEQ ID NO: 1059 - RNA, 17 nt, Artificial Sequence
  Description of Artificial Sequence:  Enzymatic Nucleic Acid
accagauucugcgggag

SEQ ID NO: 1060 - RNA, 17 nt, Artificial Sequence
  Description of Artificial Sequence:  Enzymatic Nucleic Acid
gaggagcuucugcauuu

SEQ ID NO: 1061 - RNA, 17 nt, Artificial Sequence
  Description of Artificial Sequence:  Enzymatic Nucleic Acid
aggagcuucugcauuuc

SEQ ID NO: 1062 - RNA, 17 nt, Artificial Sequence
  Description of Artificial Sequence:  Enzymatic Nucleic Acid
uucugcauuuccaagcc

SEQ ID NO: 1063 - RNA, 17 nt, Artificial Sequence
  Description of Artificial Sequence:  Enzymatic Nucleic Acid
ucugcauuuccaagcca

SEQ ID NO: 1064 - RNA, 17 nt, Artificial Sequence
  Description of Artificial Sequence:  Enzymatic Nucleic Acid
cugcauuuccaagccag

SEQ ID NO: 1065 - RNA, 17 nt, Artificial Sequence
  Description of Artificial Sequence:  Enzymatic Nucleic Acid
gaaggaguuccucaugu

SEQ ID NO: 1066 - RNA, 17 nt, Artificial Sequence
  Description of Artificial Sequence:  Enzymatic Nucleic Acid
aaggaguuccucaugug

SEQ ID NO: 1067 - RNA, 17 nt, Artificial Sequence
  Description of Artificial Sequence:  Enzymatic Nucleic Acid
gaguuccucaugugcaa

SEQ ID NO: 1068 - RNA, 17 nt, Artificial Sequence
  Description of Artificial Sequence:  Enzymatic Nucleic Acid
gugcaaguuccaggagg

SEQ ID NO: 1069 - RNA, 17 nt, Artificial Sequence
  Description of Artificial Sequence:  Enzymatic Nucleic Acid
ugcaaguuccaggaggc

SEQ ID NO: 1070 - RNA, 17 nt, Artificial Sequence
  Description of Artificial Sequence:  Enzymatic Nucleic Acid
gagagacucggccugga

SEQ ID NO: 1071 - RNA, 17 nt, Artificial Sequence
  Description of Artificial Sequence:  Enzymatic Nucleic Acid
gagaagcucgaucugaa

SEQ ID NO: 1072 - RNA, 17 nt, Artificial Sequence
  Description of Artificial Sequence:  Enzymatic Nucleic Acid
agcucgaucugaagagg

SEQ ID NO: 1073 - RNA, 17 nt, Artificial Sequence
  Description of Artificial Sequence:  Enzymatic Nucleic Acid
agcaggcucugcgggag

SEQ ID NO: 1074 - RNA, 17 nt, Artificial Sequence
  Description of Artificial Sequence:  Enzymatic Nucleic Acid
caaggccucugugaaag

SEQ ID NO: 1075 - RNA, 17 nt, Artificial Sequence
  Description of Artificial Sequence:  Enzymatic Nucleic Acid
ggugacguccuugcucg

SEQ ID NO: 1076 - RNA, 17 nt, Artificial Sequence
  Description of Artificial Sequence:  Enzymatic Nucleic Acid
gacguccuugcucgggg

SEQ ID NO: 1077 - RNA, 17 nt, Artificial Sequence
  Description of Artificial Sequence:  Enzymatic Nucleic Acid
uccuugcucggggagcu

SEQ ID NO: 1078 - RNA, 17 nt, Artificial Sequence
  Description of Artificial Sequence:  Enzymatic Nucleic Acid
gccagagucgcuuggag

SEQ ID NO: 1079 - RNA, 17 nt, Artificial Sequence
  Description of Artificial Sequence:  Enzymatic Nucleic Acid
gagucgcuuggaggcug

SEQ ID NO: 1080 - RNA, 17 nt, Artificial Sequence
  Description of Artificial Sequence:  Enzymatic Nucleic Acid
cugccacuaaggaaugc

SEQ ID NO: 1081 - RNA, 17 nt, Artificial Sequence
  Description of Artificial Sequence:  Enzymatic Nucleic Acid
gccaggcucuggagggu

SEQ ID NO: 1082 - RNA, 17 nt, Artificial Sequence
  Description of Artificial Sequence:  Enzymatic Nucleic Acid
uggagggucgggcccgg

SEQ ID NO: 1083 - RNA, 17 nt, Artificial Sequence
  Description of Artificial Sequence:  Enzymatic Nucleic Acid
gccgcgcuccgcaugga

SEQ ID NO: 1084 - RNA, 17 nt, Artificial Sequence
  Description of Artificial Sequence:  Enzymatic Nucleic Acid
ggccgccucggaggaga

SEQ ID NO: 1085 - RNA, 17 nt, Artificial Sequence
  Description of Artificial Sequence:  Enzymatic Nucleic Acid
ggcccaguugcaggugg

SEQ ID NO: 1086 - RNA, 17 nt, Artificial Sequence
  Description of Artificial Sequence:  Enzymatic Nucleic Acid
gguggccuaucaccagc

SEQ ID NO: 1087 - RNA, 17 nt, Artificial Sequence
  Description of Artificial Sequence:  Enzymatic Nucleic Acid
uggccuaucaccagcuc

SEQ ID NO: 1088 - RNA, 17 nt, Artificial Sequence
  Description of Artificial Sequence:  Enzymatic Nucleic Acid
caccagcucuuccaaga

SEQ ID NO: 1089 - RNA, 17 nt, Artificial Sequence
  Description of Artificial Sequence:  Enzymatic Nucleic Acid
ccagcucuuccaagaau

SEQ ID NO: 1090 - RNA, 17 nt, Artificial Sequence
  Description of Artificial Sequence:  Enzymatic Nucleic Acid
cagcucuuccaagaaua

SEQ ID NO: 1091 - RNA, 17 nt, Artificial Sequence
  Description of Artificial Sequence:  Enzymatic Nucleic Acid
ccaagaauacgacaacc

SEQ ID NO: 1092 - RNA, 17 nt, Artificial Sequence
  Description of Artificial Sequence:  Enzymatic Nucleic Acid
aaccacaucaagagcag

SEQ ID NO: 1093 - RNA, 17 nt, Artificial Sequence
  Description of Artificial Sequence:  Enzymatic Nucleic Acid
uggaagaucucaaacag

SEQ ID NO: 1094 - RNA, 17 nt, Artificial Sequence
  Description of Artificial Sequence:  Enzymatic Nucleic Acid
gaagaucucaaacagca

SEQ ID NO: 1095 - RNA, 17 nt, Artificial Sequence
  Description of Artificial Sequence:  Enzymatic Nucleic Acid
cagcagcuccagcaggc

SEQ ID NO: 1096 - RNA, 17 nt, Artificial Sequence
  Description of Artificial Sequence:  Enzymatic Nucleic Acid
gaggugaucgauaagcu

SEQ ID NO: 1097 - RNA, 17 nt, Artificial Sequence
  Description of Artificial Sequence:  Enzymatic Nucleic Acid
ugaucgauaagcugaag

SEQ ID NO: 1098 - RNA, 17 nt, Artificial Sequence
  Description of Artificial Sequence:  Enzymatic Nucleic Acid
cacaagauugugaugga

SEQ ID NO: 1099 - RNA, 17 nt, Artificial Sequence
  Description of Artificial Sequence:  Enzymatic Nucleic Acid
gagaccguuccggugcu

SEQ ID NO: 1100 - RNA, 17 nt, Artificial Sequence
  Description of Artificial Sequence:  Enzymatic Nucleic Acid
agaccguuccggugcug

SEQ ID NO: 1101 - RNA, 17 nt, Artificial Sequence
  Description of Artificial Sequence:  Enzymatic Nucleic Acid
aggcggauaucuacaag

SEQ ID NO: 1102 - RNA, 17 nt, Artificial Sequence
  Description of Artificial Sequence:  Enzymatic Nucleic Acid
gcggauaucuacaaggc

SEQ ID NO: 1103 - RNA, 17 nt, Artificial Sequence
  Description of Artificial Sequence:  Enzymatic Nucleic Acid
ggauaucuacaaggcgg

SEQ ID NO: 1104 - RNA, 17 nt, Artificial Sequence
  Description of Artificial Sequence:  Enzymatic Nucleic Acid
ggcggacuuccaggcug

SEQ ID NO: 1105 - RNA, 17 nt, Artificial Sequence
  Description of Artificial Sequence:  Enzymatic Nucleic Acid
gcggacuuccaggcuga

SEQ ID NO: 1106 - RNA, 17 nt, Artificial Sequence
  Description of Artificial Sequence:  Enzymatic Nucleic Acid
aaggagcuccugcagga

SEQ ID NO: 1107 - RNA, 17 nt, Artificial Sequence
  Description of Artificial Sequence:  Enzymatic Nucleic Acid
gagggaguacagcaaac

SEQ ID NO: 1108 - RNA, 17 nt, Artificial Sequence
  Description of Artificial Sequence:  Enzymatic Nucleic Acid
ccagcugucaggagucg

SEQ ID NO: 1109 - RNA, 17 nt, Artificial Sequence
  Description of Artificial Sequence:  Enzymatic Nucleic Acid
ucaggagucggccagga

SEQ ID NO: 1110 - RNA, 17 nt, Artificial Sequence
  Description of Artificial Sequence:  Enzymatic Nucleic Acid
gccaggaucgaggacau

SEQ ID NO: 1111 - RNA, 17 nt, Artificial Sequence
  Description of Artificial Sequence:  Enzymatic Nucleic Acid
cggcaugucgaggucuc

SEQ ID NO: 1112 - RNA, 17 nt, Artificial Sequence
  Description of Artificial Sequence:  Enzymatic Nucleic Acid
gucgaggucucccaggc

SEQ ID NO: 1113 - RNA, 17 nt, Artificial Sequence
  Description of Artificial Sequence:  Enzymatic Nucleic Acid
cgaggucucccaggccc

SEQ ID NO: 1114 - RNA, 17 nt, Artificial Sequence
  Description of Artificial Sequence:  Enzymatic Nucleic Acid
ggcccccuugccccccg

SEQ ID NO: 1115 - RNA, 17 nt, Artificial Sequence
  Description of Artificial Sequence:  Enzymatic Nucleic Acid
cccugccuaccucuccu

SEQ ID NO: 1116 - RNA, 17 nt, Artificial Sequence
  Description of Artificial Sequence:  Enzymatic Nucleic Acid
gccuaccucuccucucc

SEQ ID NO: 1117 - RNA, 17 nt, Artificial Sequence
  Description of Artificial Sequence:  Enzymatic Nucleic Acid
cuaccucuccucucccc

SEQ ID NO: 1118 - RNA, 17 nt, Artificial Sequence
  Description of Artificial Sequence:  Enzymatic Nucleic Acid
ccucuccucuccccugg

SEQ ID NO: 1119 - RNA, 17 nt, Artificial Sequence
  Description of Artificial Sequence:  Enzymatic Nucleic Acid
ucuccucuccccuggcc

SEQ ID NO: 1120 - RNA, 17 nt, Artificial Sequence
  Description of Artificial Sequence:  Enzymatic Nucleic Acid
accugacuucugcuguc

SEQ ID NO: 1121 - RNA, 17 nt, Artificial Sequence
  Description of Artificial Sequence:  Enzymatic Nucleic Acid
ccugacuucugcugucc

SEQ ID NO: 1122 - RNA, 17 nt, Artificial Sequence
  Description of Artificial Sequence:  Enzymatic Nucleic Acid
ucugcugucccaagugc

SEQ ID NO: 1123 - RNA, 17 nt, Artificial Sequence
  Description of Artificial Sequence:  Enzymatic Nucleic Acid
gugccaguaucaggccc

SEQ ID NO: 1124 - RNA, 17 nt, Artificial Sequence
  Description of Artificial Sequence:  Enzymatic Nucleic Acid
gccaguaucaggccccu

SEQ ID NO: 1125 - RNA, 17 nt, Artificial Sequence
  Description of Artificial Sequence:  Enzymatic Nucleic Acid
ccccugauauggacacc

SEQ ID NO: 1126 - RNA, 17 nt, Artificial Sequence
  Description of Artificial Sequence:  Enzymatic Nucleic Acid
cugcagauacaugucau

SEQ ID NO: 1127 - RNA, 17 nt, Artificial Sequence
  Description of Artificial Sequence:  Enzymatic Nucleic Acid
auacaugucauggagug

SEQ ID NO: 1128 - RNA, 17 nt, Artificial Sequence
  Description of Artificial Sequence:  Enzymatic Nucleic Acid
gagugcauugaguaggg

SEQ ID NO: 1129 - RNA, 17 nt, Artificial Sequence
  Description of Artificial Sequence:  Enzymatic Nucleic Acid
cauugaguagggccggc

SEQ ID NO: 1130 - RNA, 17 nt, Artificial Sequence
  Description of Artificial Sequence:  Enzymatic Nucleic Acid
cgugcagucugcgcuuu

SEQ ID NO: 1131 - RNA, 17 nt, Artificial Sequence
  Description of Artificial Sequence:  Enzymatic Nucleic Acid
ucugcgcuuuccucucc

SEQ ID NO: 1132 - RNA, 17 nt, Artificial Sequence
  Description of Artificial Sequence:  Enzymatic Nucleic Acid
cugcgcuuuccucuccc

SEQ ID NO: 1133 - RNA, 17 nt, Artificial Sequence
  Description of Artificial Sequence:  Enzymatic Nucleic Acid
ugcgcuuuccucucccg

SEQ ID NO: 1134 - RNA, 17 nt, Artificial Sequence
  Description of Artificial Sequence:  Enzymatic Nucleic Acid
gcuuuccucucccgccu

SEQ ID NO: 1135 - RNA, 17 nt, Artificial Sequence
  Description of Artificial Sequence:  Enzymatic Nucleic Acid
uuuccucucccgccugc

SEQ ID NO: 1136 - RNA, 17 nt, Artificial Sequence
  Description of Artificial Sequence:  Enzymatic Nucleic Acid
gccugccuagcccagga

SEQ ID NO: 1137 - RNA, 17 nt, Artificial Sequence
  Description of Artificial Sequence:  Enzymatic Nucleic Acid
cggcaccuuacgcuuca

SEQ ID NO: 1138 - RNA, 17 nt, Artificial Sequence
  Description of Artificial Sequence:  Enzymatic Nucleic Acid
ggcaccuuacgcuucag

SEQ ID NO: 1139 - RNA, 17 nt, Artificial Sequence
  Description of Artificial Sequence:  Enzymatic Nucleic Acid
cuuacgcuucagcuguu

SEQ ID NO: 1140 - RNA, 17 nt, Artificial Sequence
  Description of Artificial Sequence:  Enzymatic Nucleic Acid
uuacgcuucagcuguug

SEQ ID NO: 1141 - RNA, 17 nt, Artificial Sequence
  Description of Artificial Sequence:  Enzymatic Nucleic Acid
ucagcuguugauccgcu

SEQ ID NO: 1142 - RNA, 17 nt, Artificial Sequence
  Description of Artificial Sequence:  Enzymatic Nucleic Acid
cuguugauccgcugguc

SEQ ID NO: 1143 - RNA, 17 nt, Artificial Sequence
  Description of Artificial Sequence:  Enzymatic Nucleic Acid
ccgcugguccccucuuu

SEQ ID NO: 1144 - RNA, 17 nt, Artificial Sequence
  Description of Artificial Sequence:  Enzymatic Nucleic Acid
gguccccucuuuugggg

SEQ ID NO: 1145 - RNA, 17 nt, Artificial Sequence
  Description of Artificial Sequence:  Enzymatic Nucleic Acid
uccccucuuuuggggua

SEQ ID NO: 1146 - RNA, 17 nt, Artificial Sequence
  Description of Artificial Sequence:  Enzymatic Nucleic Acid
ccccucuuuugggguag

SEQ ID NO: 1147 - RNA, 17 nt, Artificial Sequence
  Description of Artificial Sequence:  Enzymatic Nucleic Acid
cccucuuuugggguaga

SEQ ID NO: 1148 - RNA, 17 nt, Artificial Sequence
  Description of Artificial Sequence:  Enzymatic Nucleic Acid
uuugggguagaugcggc

SEQ ID NO: 1149 - RNA, 17 nt, Artificial Sequence
  Description of Artificial Sequence:  Enzymatic Nucleic Acid
gccccgaucaggccuga

SEQ ID NO: 1150 - RNA, 17 nt, Artificial Sequence
  Description of Artificial Sequence:  Enzymatic Nucleic Acid
gccugacucgcugcucu

SEQ ID NO: 1151 - RNA, 17 nt, Artificial Sequence
  Description of Artificial Sequence:  Enzymatic Nucleic Acid
ucgcugcucuuuuuguu

SEQ ID NO: 1152 - RNA, 17 nt, Artificial Sequence
  Description of Artificial Sequence:  Enzymatic Nucleic Acid
gcugcucuuuuuguucc

SEQ ID NO: 1153 - RNA, 17 nt, Artificial Sequence
  Description of Artificial Sequence:  Enzymatic Nucleic Acid
cugcucuuuuuguuccc

SEQ ID NO: 1154 - RNA, 17 nt, Artificial Sequence
  Description of Artificial Sequence:  Enzymatic Nucleic Acid
ugcucuuuuuguucccu

SEQ ID NO: 1155 - RNA, 17 nt, Artificial Sequence
  Description of Artificial Sequence:  Enzymatic Nucleic Acid
gcucuuuuuguucccuu

SEQ ID NO: 1156 - RNA, 17 nt, Artificial Sequence
  Description of Artificial Sequence:  Enzymatic Nucleic Acid
cuuuuuguucccuucug

SEQ ID NO: 1157 - RNA, 17 nt, Artificial Sequence
  Description of Artificial Sequence:  Enzymatic Nucleic Acid
uuuuuguucccuucugu

SEQ ID NO: 1158 - RNA, 17 nt, Artificial Sequence
  Description of Artificial Sequence:  Enzymatic Nucleic Acid
uguucccuucugucugc

SEQ ID NO: 1159 - RNA, 17 nt, Artificial Sequence
  Description of Artificial Sequence:  Enzymatic Nucleic Acid
guucccuucugucugcu

SEQ ID NO: 1160 - RNA, 17 nt, Artificial Sequence
  Description of Artificial Sequence:  Enzymatic Nucleic Acid
ccuucugucugcucgaa

SEQ ID NO: 1161 - RNA, 17 nt, Artificial Sequence
  Description of Artificial Sequence:  Enzymatic Nucleic Acid
ugucugcucgaaccacu

SEQ ID NO: 1162 - RNA, 17 nt, Artificial Sequence
  Description of Artificial Sequence:  Enzymatic Nucleic Acid
gaaccacuugccucggg

SEQ ID NO: 1163 - RNA, 17 nt, Artificial Sequence
  Description of Artificial Sequence:  Enzymatic Nucleic Acid
acuugccucgggcuaau

SEQ ID NO: 1164 - RNA, 17 nt, Artificial Sequence
  Description of Artificial Sequence:  Enzymatic Nucleic Acid
cucgggcuaaucccucc

SEQ ID NO: 1165 - RNA, 17 nt, Artificial Sequence
  Description of Artificial Sequence:  Enzymatic Nucleic Acid
gggcuaaucccucccuc

SEQ ID NO: 1166 - RNA, 17 nt, Artificial Sequence
  Description of Artificial Sequence:  Enzymatic Nucleic Acid
uaaucccucccucuucc

SEQ ID NO: 1167 - RNA, 17 nt, Artificial Sequence
  Description of Artificial Sequence:  Enzymatic Nucleic Acid
cccucccucuuccucca

SEQ ID NO: 1168 - RNA, 17 nt, Artificial Sequence
  Description of Artificial Sequence:  Enzymatic Nucleic Acid
cucccucuuccuccacc

SEQ ID NO: 1169 - RNA, 17 nt, Artificial Sequence
  Description of Artificial Sequence:  Enzymatic Nucleic Acid
ucccucuuccuccaccc

SEQ ID NO: 1170 - RNA, 17 nt, Artificial Sequence
  Description of Artificial Sequence:  Enzymatic Nucleic Acid
cucuuccuccacccggc

SEQ ID NO: 1171 - RNA, 17 nt, Artificial Sequence
  Description of Artificial Sequence:  Enzymatic Nucleic Acid
ggggaagucaagaaugg

SEQ ID NO: 1172 - RNA, 17 nt, Artificial Sequence
  Description of Artificial Sequence:  Enzymatic Nucleic Acid
cuggggcucucagggag

SEQ ID NO: 1173 - RNA, 17 nt, Artificial Sequence
  Description of Artificial Sequence:  Enzymatic Nucleic Acid
ggggcucucagggagaa

SEQ ID NO: 1174 - RNA, 17 nt, Artificial Sequence
  Description of Artificial Sequence:  Enzymatic Nucleic Acid
gaacugcuuccccuggc

SEQ ID NO: 1175 - RNA, 17 nt, Artificial Sequence
  Description of Artificial Sequence:  Enzymatic Nucleic Acid
aacugcuuccccuggca

SEQ ID NO: 1176 - RNA, 17 nt, Artificial Sequence
  Description of Artificial Sequence:  Enzymatic Nucleic Acid
uggcagcucuuccuccc

SEQ ID NO: 1177 - RNA, 17 nt, Artificial Sequence
  Description of Artificial Sequence:  Enzymatic Nucleic Acid
gcagcucuuccucccac

SEQ ID NO: 1178 - RNA, 17 nt, Artificial Sequence
  Description of Artificial Sequence:  Enzymatic Nucleic Acid
cagcucuuccucccacc

SEQ ID NO: 1179 - RNA, 17 nt, Artificial Sequence
  Description of Artificial Sequence:  Enzymatic Nucleic Acid
cucuuccucccaccgga

SEQ ID NO: 1180 - RNA, 17 nt, Artificial Sequence
  Description of Artificial Sequence:  Enzymatic Nucleic Acid
gcugcccucuuaccaug

SEQ ID NO: 1181 - RNA, 17 nt, Artificial Sequence
  Description of Artificial Sequence:  Enzymatic Nucleic Acid
ugcccucuuaccaugca

SEQ ID NO: 1182 - RNA, 17 nt, Artificial Sequence
  Description of Artificial Sequence:  Enzymatic Nucleic Acid
gcccucuuaccaugcac

SEQ ID NO: 1183 - RNA, 17 nt, Artificial Sequence
  Description of Artificial Sequence:  Enzymatic Nucleic Acid
cgggugcucuccuuuug

SEQ ID NO: 1184 - RNA, 17 nt, Artificial Sequence
  Description of Artificial Sequence:  Enzymatic Nucleic Acid
ggugcucuccuuuuggg

SEQ ID NO: 1185 - RNA, 17 nt, Artificial Sequence
  Description of Artificial Sequence:  Enzymatic Nucleic Acid
gcucuccuuuugggcug

SEQ ID NO: 1186 - RNA, 17 nt, Artificial Sequence
  Description of Artificial Sequence:  Enzymatic Nucleic Acid
cucuccuuuugggcugc

SEQ ID NO: 1187 - RNA, 17 nt, Artificial Sequence
  Description of Artificial Sequence:  Enzymatic Nucleic Acid
ucuccuuuugggcugca

SEQ ID NO: 1188 - RNA, 17 nt, Artificial Sequence
  Description of Artificial Sequence:  Enzymatic Nucleic Acid
ugcaugcuauuccauuu

SEQ ID NO: 1189 - RNA, 17 nt, Artificial Sequence
  Description of Artificial Sequence:  Enzymatic Nucleic Acid
caugcuauuccauuuug

SEQ ID NO: 1190 - RNA, 17 nt, Artificial Sequence
  Description of Artificial Sequence:  Enzymatic Nucleic Acid
augcuauuccauuuugc

SEQ ID NO: 1191 - RNA, 17 nt, Artificial Sequence
  Description of Artificial Sequence:  Enzymatic Nucleic Acid
uauuccauuuugcagcc

SEQ ID NO: 1192 - RNA, 17 nt, Artificial Sequence
  Description of Artificial Sequence:  Enzymatic Nucleic Acid
auuccauuuugcagcca

SEQ ID NO: 1193 - RNA, 17 nt, Artificial Sequence
  Description of Artificial Sequence:  Enzymatic Nucleic Acid
uuccauuuugcagccag

SEQ ID NO: 1194 - RNA, 17 nt, Artificial Sequence
  Description of Artificial Sequence:  Enzymatic Nucleic Acid
cgauguguauuuaacca

SEQ ID NO: 1195 - RNA, 17 nt, Artificial Sequence
  Description of Artificial Sequence:  Enzymatic Nucleic Acid
auguguauuuaaccagu

SEQ ID NO: 1196 - RNA, 17 nt, Artificial Sequence
  Description of Artificial Sequence:  Enzymatic Nucleic Acid
uguguauuuaaccaguc

SEQ ID NO: 1197 - RNA, 17 nt, Artificial Sequence
  Description of Artificial Sequence:  Enzymatic Nucleic Acid
guguauuuaaccaguca

SEQ ID NO: 1198 - RNA, 17 nt, Artificial Sequence
  Description of Artificial Sequence:  Enzymatic Nucleic Acid
uaaccagucacuauuga

SEQ ID NO: 1199 - RNA, 17 nt, Artificial Sequence
  Description of Artificial Sequence:  Enzymatic Nucleic Acid
cagucacuauugaugga

SEQ ID NO: 1200 - RNA, 17 nt, Artificial Sequence
  Description of Artificial Sequence:  Enzymatic Nucleic Acid
gucacuauugauggaca

SEQ ID NO: 1201 - RNA, 17 nt, Artificial Sequence
  Description of Artificial Sequence:  Enzymatic Nucleic Acid
auggacauuuggguugu

SEQ ID NO: 1202 - RNA, 17 nt, Artificial Sequence
  Description of Artificial Sequence:  Enzymatic Nucleic Acid
uggacauuuggguuguu

SEQ ID NO: 1203 - RNA, 17 nt, Artificial Sequence
  Description of Artificial Sequence:  Enzymatic Nucleic Acid
auuuggguuguuuccca

SEQ ID NO: 1204 - RNA, 17 nt, Artificial Sequence
  Description of Artificial Sequence:  Enzymatic Nucleic Acid
uggguuguuucccaucu

SEQ ID NO: 1205 - RNA, 17 nt, Artificial Sequence
  Description of Artificial Sequence:  Enzymatic Nucleic Acid
ggguuguuucccaucuu

SEQ ID NO: 1206 - RNA, 17 nt, Artificial Sequence
  Description of Artificial Sequence:  Enzymatic Nucleic Acid
gguuguuucccaucuuu

SEQ ID NO: 1207 - RNA, 17 nt, Artificial Sequence
  Description of Artificial Sequence:  Enzymatic Nucleic Acid
uuucccaucuuuuuguu

SEQ ID NO: 1208 - RNA, 17 nt, Artificial Sequence
  Description of Artificial Sequence:  Enzymatic Nucleic Acid
ucccaucuuuuuguuac

SEQ ID NO: 1209 - RNA, 17 nt, Artificial Sequence
  Description of Artificial Sequence:  Enzymatic Nucleic Acid
cccaucuuuuuguuacc

SEQ ID NO: 1210 - RNA, 17 nt, Artificial Sequence
  Description of Artificial Sequence:  Enzymatic Nucleic Acid
ccaucuuuuuguuacca

SEQ ID NO: 1211 - RNA, 17 nt, Artificial Sequence
  Description of Artificial Sequence:  Enzymatic Nucleic Acid
caucuuuuuguuaccau

SEQ ID NO: 1212 - RNA, 17 nt, Artificial Sequence
  Description of Artificial Sequence:  Enzymatic Nucleic Acid
cuuuuuguuaccauaaa

SEQ ID NO: 1213 - RNA, 17 nt, Artificial Sequence
  Description of Artificial Sequence:  Enzymatic Nucleic Acid
uuuuuguuaccauaaau

SEQ ID NO: 1214 - RNA, 17 nt, Artificial Sequence
  Description of Artificial Sequence:  Enzymatic Nucleic Acid
guuaccauaaauaaugg

SEQ ID NO: 1215 - RNA, 17 nt, Artificial Sequence
  Description of Artificial Sequence:  Enzymatic Nucleic Acid
ccauaaauaauggcaua

SEQ ID NO: 1216 - RNA, 17 nt, Artificial Sequence
  Description of Artificial Sequence:  Enzymatic Nucleic Acid
aauggcauaguaaaaaa

SEQ ID NO: 1217 - RNA, 17 nt, Artificial Sequence
  Description of Artificial Sequence:  Enzymatic Nucleic Acid
ggcauaguaaaaaaaaa

SEQ ID NO: 1218 - RNA, 17 nt, Artificial Sequence
  Description of Artificial Sequence:  Enzymatic Nucleic Acid
gcacgagcauggcccuu

SEQ ID NO: 1219 - RNA, 17 nt, Artificial Sequence
  Description of Artificial Sequence:  Enzymatic Nucleic Acid
agcauggcccuugugau

SEQ ID NO: 1220 - RNA, 17 nt, Artificial Sequence
  Description of Artificial Sequence:  Enzymatic Nucleic Acid
gcauggcccuugugauc

SEQ ID NO: 1221 - RNA, 17 nt, Artificial Sequence
  Description of Artificial Sequence:  Enzymatic Nucleic Acid
cauggcccuugugaucc

SEQ ID NO: 1222 - RNA, 17 nt, Artificial Sequence
  Description of Artificial Sequence:  Enzymatic Nucleic Acid
uugugauccaggugggg

SEQ ID NO: 1223 - RNA, 17 nt, Artificial Sequence
  Description of Artificial Sequence:  Enzymatic Nucleic Acid
ugugauccaggugggga

SEQ ID NO: 1224 - RNA, 17 nt, Artificial Sequence
  Description of Artificial Sequence:  Enzymatic Nucleic Acid
ggggaaacuaaggccca

SEQ ID NO: 1225 - RNA, 17 nt, Artificial Sequence
  Description of Artificial Sequence:  Enzymatic Nucleic Acid
acuaaggcccagagaag

SEQ ID NO: 1226 - RNA, 17 nt, Artificial Sequence
  Description of Artificial Sequence:  Enzymatic Nucleic Acid
cuaaggcccagagaagu

SEQ ID NO: 1227 - RNA, 17 nt, Artificial Sequence
  Description of Artificial Sequence:  Enzymatic Nucleic Acid
uaaggcccagagaagug

SEQ ID NO: 1228 - RNA, 17 nt, Artificial Sequence
  Description of Artificial Sequence:  Enzymatic Nucleic Acid
gugaggaccccgcagac

SEQ ID NO: 1229 - RNA, 17 nt, Artificial Sequence
  Description of Artificial Sequence:  Enzymatic Nucleic Acid
ugaggaccccgcagacu

SEQ ID NO: 1230 - RNA, 17 nt, Artificial Sequence
  Description of Artificial Sequence:  Enzymatic Nucleic Acid
gaggaccccgcagacua

SEQ ID NO: 1231 - RNA, 17 nt, Artificial Sequence
  Description of Artificial Sequence:  Enzymatic Nucleic Acid
gaccccgcagacuauca

SEQ ID NO: 1232 - RNA, 17 nt, Artificial Sequence
  Description of Artificial Sequence:  Enzymatic Nucleic Acid
ccgcagacuaucaaucc

SEQ ID NO: 1233 - RNA, 17 nt, Artificial Sequence
  Description of Artificial Sequence:  Enzymatic Nucleic Acid
agacuaucaaucccagu

SEQ ID NO: 1234 - RNA, 17 nt, Artificial Sequence
  Description of Artificial Sequence:  Enzymatic Nucleic Acid
uaucaaucccagucucu

SEQ ID NO: 1235 - RNA, 17 nt, Artificial Sequence
  Description of Artificial Sequence:  Enzymatic Nucleic Acid
aucaaucccagucucuu

SEQ ID NO: 1236 - RNA, 17 nt, Artificial Sequence
  Description of Artificial Sequence:  Enzymatic Nucleic Acid
ucaaucccagucucuuc

SEQ ID NO: 1237 - RNA, 17 nt, Artificial Sequence
  Description of Artificial Sequence:  Enzymatic Nucleic Acid
ucccagucucuuccccu

SEQ ID NO: 1238 - RNA, 17 nt, Artificial Sequence
  Description of Artificial Sequence:  Enzymatic Nucleic Acid
ccagucucuuccccuca

SEQ ID NO: 1239 - RNA, 17 nt, Artificial Sequence
  Description of Artificial Sequence:  Enzymatic Nucleic Acid
gucucuuccccucacuc

SEQ ID NO: 1240 - RNA, 17 nt, Artificial Sequence
  Description of Artificial Sequence:  Enzymatic Nucleic Acid
ucucuuccccucacucc

SEQ ID NO: 1241 - RNA, 17 nt, Artificial Sequence
  Description of Artificial Sequence:  Enzymatic Nucleic Acid
cucuuccccucacuccc

SEQ ID NO: 1242 - RNA, 17 nt, Artificial Sequence
  Description of Artificial Sequence:  Enzymatic Nucleic Acid
ucuuccccucacucccu

SEQ ID NO: 1243 - RNA, 17 nt, Artificial Sequence
  Description of Artificial Sequence:  Enzymatic Nucleic Acid
uuccccucacucccugu

SEQ ID NO: 1244 - RNA, 17 nt, Artificial Sequence
  Description of Artificial Sequence:  Enzymatic Nucleic Acid
ccccucacucccuguga

SEQ ID NO: 1245 - RNA, 17 nt, Artificial Sequence
  Description of Artificial Sequence:  Enzymatic Nucleic Acid
ccucacucccugugaag

SEQ ID NO: 1246 - RNA, 17 nt, Artificial Sequence
  Description of Artificial Sequence:  Enzymatic Nucleic Acid
cucacucccugugaagc

SEQ ID NO: 1247 - RNA, 17 nt, Artificial Sequence
  Description of Artificial Sequence:  Enzymatic Nucleic Acid
ucacucccugugaagcu

SEQ ID NO: 1248 - RNA, 17 nt, Artificial Sequence
  Description of Artificial Sequence:  Enzymatic Nucleic Acid
ugugaagcucuccagca

SEQ ID NO: 1249 - RNA, 17 nt, Artificial Sequence
  Description of Artificial Sequence:  Enzymatic Nucleic Acid
ugaagcucuccagcauc

SEQ ID NO: 1250 - RNA, 17 nt, Artificial Sequence
  Description of Artificial Sequence:  Enzymatic Nucleic Acid
aagcucuccagcaucau

SEQ ID NO: 1251 - RNA, 17 nt, Artificial Sequence
  Description of Artificial Sequence:  Enzymatic Nucleic Acid
agcucuccagcaucauc

SEQ ID NO: 1252 - RNA, 17 nt, Artificial Sequence
  Description of Artificial Sequence:  Enzymatic Nucleic Acid
ucuccagcaucaucgag

SEQ ID NO: 1253 - RNA, 17 nt, Artificial Sequence
  Description of Artificial Sequence:  Enzymatic Nucleic Acid
ccagcaucaucgagguc

SEQ ID NO: 1254 - RNA, 17 nt, Artificial Sequence
  Description of Artificial Sequence:  Enzymatic Nucleic Acid
ucgaggucccaucagcc

SEQ ID NO: 1255 - RNA, 17 nt, Artificial Sequence
  Description of Artificial Sequence:  Enzymatic Nucleic Acid
cgaggucccaucagccc

SEQ ID NO: 1256 - RNA, 17 nt, Artificial Sequence
  Description of Artificial Sequence:  Enzymatic Nucleic Acid
gaggucccaucagcccu

SEQ ID NO: 1257 - RNA, 17 nt, Artificial Sequence
  Description of Artificial Sequence:  Enzymatic Nucleic Acid
gucccaucagcccuugc

SEQ ID NO: 1258 - RNA, 17 nt, Artificial Sequence
  Description of Artificial Sequence:  Enzymatic Nucleic Acid
ccaucagcccuugcccu

SEQ ID NO: 1259 - RNA, 17 nt, Artificial Sequence
  Description of Artificial Sequence:  Enzymatic Nucleic Acid
caucagcccuugcccug

SEQ ID NO: 1260 - RNA, 17 nt, Artificial Sequence
  Description of Artificial Sequence:  Enzymatic Nucleic Acid
aucagcccuugcccugu

SEQ ID NO: 1261 - RNA, 17 nt, Artificial Sequence
  Description of Artificial Sequence:  Enzymatic Nucleic Acid
gcccuugcccuguugga

SEQ ID NO: 1262 - RNA, 17 nt, Artificial Sequence
  Description of Artificial Sequence:  Enzymatic Nucleic Acid
cccuugcccuguuggau

SEQ ID NO: 1263 - RNA, 17 nt, Artificial Sequence
  Description of Artificial Sequence:  Enzymatic Nucleic Acid
ccuugcccuguuggaug

SEQ ID NO: 1264 - RNA, 17 nt, Artificial Sequence
  Description of Artificial Sequence:  Enzymatic Nucleic Acid
gaauaggcaccucugga

SEQ ID NO: 1265 - RNA, 17 nt, Artificial Sequence
  Description of Artificial Sequence:  Enzymatic Nucleic Acid
auaggcaccucuggaag

SEQ ID NO: 1266 - RNA, 17 nt, Artificial Sequence
  Description of Artificial Sequence:  Enzymatic Nucleic Acid
uaggcaccucuggaaga

SEQ ID NO: 1267 - RNA, 17 nt, Artificial Sequence
  Description of Artificial Sequence:  Enzymatic Nucleic Acid
ggcaccucuggaagagc

SEQ ID NO: 1268 - RNA, 17 nt, Artificial Sequence
  Description of Artificial Sequence:  Enzymatic Nucleic Acid
ggaagagccaacugugu

SEQ ID NO: 1269 - RNA, 17 nt, Artificial Sequence
  Description of Artificial Sequence:  Enzymatic Nucleic Acid
gaagagccaacugugug

SEQ ID NO: 1270 - RNA, 17 nt, Artificial Sequence
  Description of Artificial Sequence:  Enzymatic Nucleic Acid
gagccaacugugugaga

SEQ ID NO: 1271 - RNA, 17 nt, Artificial Sequence
  Description of Artificial Sequence:  Enzymatic Nucleic Acid
gauggugcagcccagug

SEQ ID NO: 1272 - RNA, 17 nt, Artificial Sequence
  Description of Artificial Sequence:  Enzymatic Nucleic Acid
ggugcagcccaguggug

SEQ ID NO: 1273 - RNA, 17 nt, Artificial Sequence
  Description of Artificial Sequence:  Enzymatic Nucleic Acid
gugcagcccaguggugg

SEQ ID NO: 1274 - RNA, 17 nt, Artificial Sequence
  Description of Artificial Sequence:  Enzymatic Nucleic Acid
ugcagcccagugguggc

SEQ ID NO: 1275 - RNA, 17 nt, Artificial Sequence
  Description of Artificial Sequence:  Enzymatic Nucleic Acid
gugguggcccggcagca

SEQ ID NO: 1276 - RNA, 17 nt, Artificial Sequence
  Description of Artificial Sequence:  Enzymatic Nucleic Acid
ugguggcccggcagcag

SEQ ID NO: 1277 - RNA, 17 nt, Artificial Sequence
  Description of Artificial Sequence:  Enzymatic Nucleic Acid
ggcccggcagcagauca

SEQ ID NO: 1278 - RNA, 17 nt, Artificial Sequence
  Description of Artificial Sequence:  Enzymatic Nucleic Acid
ccggcagcagaucagga

SEQ ID NO: 1279 - RNA, 17 nt, Artificial Sequence
  Description of Artificial Sequence:  Enzymatic Nucleic Acid
agcagaucaggacguac

SEQ ID NO: 1280 - RNA, 17 nt, Artificial Sequence
  Description of Artificial Sequence:  Enzymatic Nucleic Acid
ggacguacugggcgaag

SEQ ID NO: 1281 - RNA, 17 nt, Artificial Sequence
  Description of Artificial Sequence:  Enzymatic Nucleic Acid
gaagagucuccucuggg

SEQ ID NO: 1282 - RNA, 17 nt, Artificial Sequence
  Description of Artificial Sequence:  Enzymatic Nucleic Acid
agagucuccucugggga

SEQ ID NO: 1283 - RNA, 17 nt, Artificial Sequence
  Description of Artificial Sequence:  Enzymatic Nucleic Acid
gagucuccucuggggaa

SEQ ID NO: 1284 - RNA, 17 nt, Artificial Sequence
  Description of Artificial Sequence:  Enzymatic Nucleic Acid
gucuccucuggggaagc

SEQ ID NO: 1285 - RNA, 17 nt, Artificial Sequence
  Description of Artificial Sequence:  Enzymatic Nucleic Acid
ggggaagccagccaugc

SEQ ID NO: 1286 - RNA, 17 nt, Artificial Sequence
  Description of Artificial Sequence:  Enzymatic Nucleic Acid
gggaagccagccaugcu

SEQ ID NO: 1287 - RNA, 17 nt, Artificial Sequence
  Description of Artificial Sequence:  Enzymatic Nucleic Acid
aagccagccaugcugca

SEQ ID NO: 1288 - RNA, 17 nt, Artificial Sequence
  Description of Artificial Sequence:  Enzymatic Nucleic Acid
agccagccaugcugcac

SEQ ID NO: 1289 - RNA, 17 nt, Artificial Sequence
  Description of Artificial Sequence:  Enzymatic Nucleic Acid
agccaugcugcaccugc

SEQ ID NO: 1290 - RNA, 17 nt, Artificial Sequence
  Description of Artificial Sequence:  Enzymatic Nucleic Acid
caugcugcaccugccuu

SEQ ID NO: 1291 - RNA, 17 nt, Artificial Sequence
  Description of Artificial Sequence:  Enzymatic Nucleic Acid
ugcugcaccugccuuca

SEQ ID NO: 1292 - RNA, 17 nt, Artificial Sequence
  Description of Artificial Sequence:  Enzymatic Nucleic Acid
gcugcaccugccuucag

SEQ ID NO: 1293 - RNA, 17 nt, Artificial Sequence
  Description of Artificial Sequence:  Enzymatic Nucleic Acid
gcaccugccuucagaac

SEQ ID NO: 1294 - RNA, 17 nt, Artificial Sequence
  Description of Artificial Sequence:  Enzymatic Nucleic Acid
caccugccuucagaaca

SEQ ID NO: 1295 - RNA, 17 nt, Artificial Sequence
  Description of Artificial Sequence:  Enzymatic Nucleic Acid
cugccuucagaacaggg

SEQ ID NO: 1296 - RNA, 17 nt, Artificial Sequence
  Description of Artificial Sequence:  Enzymatic Nucleic Acid
uucagaacagggcgcuc

SEQ ID NO: 1297 - RNA, 17 nt, Artificial Sequence
  Description of Artificial Sequence:  Enzymatic Nucleic Acid
cagggcgcuccugagac

SEQ ID NO: 1298 - RNA, 17 nt, Artificial Sequence
  Description of Artificial Sequence:  Enzymatic Nucleic Acid
gggcgcuccugagaccc

SEQ ID NO: 1299 - RNA, 17 nt, Artificial Sequence
  Description of Artificial Sequence:  Enzymatic Nucleic Acid
ggcgcuccugagacccu

SEQ ID NO: 1300 - RNA, 17 nt, Artificial Sequence
  Description of Artificial Sequence:  Enzymatic Nucleic Acid
ccugagacccuccagcg

SEQ ID NO: 1301 - RNA, 17 nt, Artificial Sequence
  Description of Artificial Sequence:  Enzymatic Nucleic Acid
cugagacccuccagcgc

SEQ ID NO: 1302 - RNA, 17 nt, Artificial Sequence
  Description of Artificial Sequence:  Enzymatic Nucleic Acid
ugagacccuccagcgcu

SEQ ID NO: 1303 - RNA, 17 nt, Artificial Sequence
  Description of Artificial Sequence:  Enzymatic Nucleic Acid
agacccuccagcgcugc

SEQ ID NO: 1304 - RNA, 17 nt, Artificial Sequence
  Description of Artificial Sequence:  Enzymatic Nucleic Acid
gacccuccagcgcugcc

SEQ ID NO: 1305 - RNA, 17 nt, Artificial Sequence
  Description of Artificial Sequence:  Enzymatic Nucleic Acid
uccagcgcugccuggag

SEQ ID NO: 1306 - RNA, 17 nt, Artificial Sequence
  Description of Artificial Sequence:  Enzymatic Nucleic Acid
agcgcugccuggaggag

SEQ ID NO: 1307 - RNA, 17 nt, Artificial Sequence
  Description of Artificial Sequence:  Enzymatic Nucleic Acid
gcgcugccuggaggaga

SEQ ID NO: 1308 - RNA, 17 nt, Artificial Sequence
  Description of Artificial Sequence:  Enzymatic Nucleic Acid
ggagaaucaagagcucc

SEQ ID NO: 1309 - RNA, 17 nt, Artificial Sequence
  Description of Artificial Sequence:  Enzymatic Nucleic Acid
ucaagagcuccgagaug

SEQ ID NO: 1310 - RNA, 17 nt, Artificial Sequence
  Description of Artificial Sequence:  Enzymatic Nucleic Acid
aagagcuccgagaugcc

SEQ ID NO: 1311 - RNA, 17 nt, Artificial Sequence
  Description of Artificial Sequence:  Enzymatic Nucleic Acid
cgagaugccauccggca

SEQ ID NO: 1312 - RNA, 17 nt, Artificial Sequence
  Description of Artificial Sequence:  Enzymatic Nucleic Acid
gagaugccauccggcag

SEQ ID NO: 1313 - RNA, 17 nt, Artificial Sequence
  Description of Artificial Sequence:  Enzymatic Nucleic Acid
augccauccggcagagc

SEQ ID NO: 1314 - RNA, 17 nt, Artificial Sequence
  Description of Artificial Sequence:  Enzymatic Nucleic Acid
cauccggcagagcaacc

SEQ ID NO: 1315 - RNA, 17 nt, Artificial Sequence
  Description of Artificial Sequence:  Enzymatic Nucleic Acid
ggcagagcaaccagauu

SEQ ID NO: 1316 - RNA, 17 nt, Artificial Sequence
  Description of Artificial Sequence:  Enzymatic Nucleic Acid
agagcaaccagauucug

SEQ ID NO: 1317 - RNA, 17 nt, Artificial Sequence
  Description of Artificial Sequence:  Enzymatic Nucleic Acid
gagcaaccagauucugc

SEQ ID NO: 1318 - RNA, 17 nt, Artificial Sequence
  Description of Artificial Sequence:  Enzymatic Nucleic Acid
ccagauucugcgggagc

SEQ ID NO: 1319 - RNA, 17 nt, Artificial Sequence
  Description of Artificial Sequence:  Enzymatic Nucleic Acid
gggagcgcugcgaggag

SEQ ID NO: 1320 - RNA, 17 nt, Artificial Sequence
  Description of Artificial Sequence:  Enzymatic Nucleic Acid
cgaggagcuucugcauu

SEQ ID NO: 1321 - RNA, 17 nt, Artificial Sequence
  Description of Artificial Sequence:  Enzymatic Nucleic Acid
ggagcuucugcauuucc

SEQ ID NO: 1322 - RNA, 17 nt, Artificial Sequence
  Description of Artificial Sequence:  Enzymatic Nucleic Acid
gcuucugcauuuccaag

SEQ ID NO: 1323 - RNA, 17 nt, Artificial Sequence
  Description of Artificial Sequence:  Enzymatic Nucleic Acid
ugcauuuccaagccagc

SEQ ID NO: 1324 - RNA, 17 nt, Artificial Sequence
  Description of Artificial Sequence:  Enzymatic Nucleic Acid
gcauuuccaagccagcc

SEQ ID NO: 1325 - RNA, 17 nt, Artificial Sequence
  Description of Artificial Sequence:  Enzymatic Nucleic Acid
uuccaagccagccagag

SEQ ID NO: 1326 - RNA, 17 nt, Artificial Sequence
  Description of Artificial Sequence:  Enzymatic Nucleic Acid
uccaagccagccagagg

SEQ ID NO: 1327 - RNA, 17 nt, Artificial Sequence
  Description of Artificial Sequence:  Enzymatic Nucleic Acid
aagccagccagagggag

SEQ ID NO: 1328 - RNA, 17 nt, Artificial Sequence
  Description of Artificial Sequence:  Enzymatic Nucleic Acid
agccagccagagggagg

SEQ ID NO: 1329 - RNA, 17 nt, Artificial Sequence
  Description of Artificial Sequence:  Enzymatic Nucleic Acid
aggaguuccucaugugc

SEQ ID NO: 1330 - RNA, 17 nt, Artificial Sequence
  Description of Artificial Sequence:  Enzymatic Nucleic Acid
ggaguuccucaugugca

SEQ ID NO: 1331 - RNA, 17 nt, Artificial Sequence
  Description of Artificial Sequence:  Enzymatic Nucleic Acid
aguuccucaugugcaag

SEQ ID NO: 1332 - RNA, 17 nt, Artificial Sequence
  Description of Artificial Sequence:  Enzymatic Nucleic Acid
ucaugugcaaguuccag

SEQ ID NO: 1333 - RNA, 17 nt, Artificial Sequence
  Description of Artificial Sequence:  Enzymatic Nucleic Acid
gcaaguuccaggaggcc

SEQ ID NO: 1334 - RNA, 17 nt, Artificial Sequence
  Description of Artificial Sequence:  Enzymatic Nucleic Acid
caaguuccaggaggcca

SEQ ID NO: 1335 - RNA, 17 nt, Artificial Sequence
  Description of Artificial Sequence:  Enzymatic Nucleic Acid
caggaggccaggaaacu

SEQ ID NO: 1336 - RNA, 17 nt, Artificial Sequence
  Description of Artificial Sequence:  Enzymatic Nucleic Acid
aggaggccaggaaacug

SEQ ID NO: 1337 - RNA, 17 nt, Artificial Sequence
  Description of Artificial Sequence:  Enzymatic Nucleic Acid
caggaaacugguggaga

SEQ ID NO: 1338 - RNA, 17 nt, Artificial Sequence
  Description of Artificial Sequence:  Enzymatic Nucleic Acid
ggagagacucggccugg

SEQ ID NO: 1339 - RNA, 17 nt, Artificial Sequence
  Description of Artificial Sequence:  Enzymatic Nucleic Acid
gacucggccuggagaag

SEQ ID NO: 1340 - RNA, 17 nt, Artificial Sequence
  Description of Artificial Sequence:  Enzymatic Nucleic Acid
acucggccuggagaagc

SEQ ID NO: 1341 - RNA, 17 nt, Artificial Sequence
  Description of Artificial Sequence:  Enzymatic Nucleic Acid
ggagaagcucgaucuga

SEQ ID NO: 1342 - RNA, 17 nt, Artificial Sequence
  Description of Artificial Sequence:  Enzymatic Nucleic Acid
gcucgaucugaagaggc

SEQ ID NO: 1343 - RNA, 17 nt, Artificial Sequence
  Description of Artificial Sequence:  Enzymatic Nucleic Acid
gaagaggcagaaggagc

SEQ ID NO: 1344 - RNA, 17 nt, Artificial Sequence
  Description of Artificial Sequence:  Enzymatic Nucleic Acid
gaaggagcaggcucugc

SEQ ID NO: 1345 - RNA, 17 nt, Artificial Sequence
  Description of Artificial Sequence:  Enzymatic Nucleic Acid
gagcaggcucugcggga

SEQ ID NO: 1346 - RNA, 17 nt, Artificial Sequence
  Description of Artificial Sequence:  Enzymatic Nucleic Acid
gcaggcucugcgggagg

SEQ ID NO: 1347 - RNA, 17 nt, Artificial Sequence
  Description of Artificial Sequence:  Enzymatic Nucleic Acid
gguggagcaccugaaga

SEQ ID NO: 1348 - RNA, 17 nt, Artificial Sequence
  Description of Artificial Sequence:  Enzymatic Nucleic Acid
uggagcaccugaagaga

SEQ ID NO: 1349 - RNA, 17 nt, Artificial Sequence
  Description of Artificial Sequence:  Enzymatic Nucleic Acid
ggagcaccugaagagau

SEQ ID NO: 1350 - RNA, 17 nt, Artificial Sequence
  Description of Artificial Sequence:  Enzymatic Nucleic Acid
agagaugccagcagcag

SEQ ID NO: 1351 - RNA, 17 nt, Artificial Sequence
  Description of Artificial Sequence:  Enzymatic Nucleic Acid
gagaugccagcagcaga

SEQ ID NO: 1352 - RNA, 17 nt, Artificial Sequence
  Description of Artificial Sequence:  Enzymatic Nucleic Acid
augccagcagcagaugg

SEQ ID NO: 1353 - RNA, 17 nt, Artificial Sequence
  Description of Artificial Sequence:  Enzymatic Nucleic Acid
ccagcagcagauggcug

SEQ ID NO: 1354 - RNA, 17 nt, Artificial Sequence
  Description of Artificial Sequence:  Enzymatic Nucleic Acid
cagauggcugaggacaa

SEQ ID NO: 1355 - RNA, 17 nt, Artificial Sequence
  Description of Artificial Sequence:  Enzymatic Nucleic Acid
cugaggacaaggccucu

SEQ ID NO: 1356 - RNA, 17 nt, Artificial Sequence
  Description of Artificial Sequence:  Enzymatic Nucleic Acid
gacaaggccucugugaa

SEQ ID NO: 1357 - RNA, 17 nt, Artificial Sequence
  Description of Artificial Sequence:  Enzymatic Nucleic Acid
acaaggccucugugaaa

SEQ ID NO: 1358 - RNA, 17 nt, Artificial Sequence
  Description of Artificial Sequence:  Enzymatic Nucleic Acid
aaggccucugugaaagc

SEQ ID NO: 1359 - RNA, 17 nt, Artificial Sequence
  Description of Artificial Sequence:  Enzymatic Nucleic Acid
gugaaagcccaggugac

SEQ ID NO: 1360 - RNA, 17 nt, Artificial Sequence
  Description of Artificial Sequence:  Enzymatic Nucleic Acid
ugaaagcccaggugacg

SEQ ID NO: 1361 - RNA, 17 nt, Artificial Sequence
  Description of Artificial Sequence:  Enzymatic Nucleic Acid
gaaagcccaggugacgu

SEQ ID NO: 1362 - RNA, 17 nt, Artificial Sequence
  Description of Artificial Sequence:  Enzymatic Nucleic Acid
gugacguccuugcucgg

SEQ ID NO: 1363 - RNA, 17 nt, Artificial Sequence
  Description of Artificial Sequence:  Enzymatic Nucleic Acid
ugacguccuugcucggg

SEQ ID NO: 1364 - RNA, 17 nt, Artificial Sequence
  Description of Artificial Sequence:  Enzymatic Nucleic Acid
guccuugcucggggagc

SEQ ID NO: 1365 - RNA, 17 nt, Artificial Sequence
  Description of Artificial Sequence:  Enzymatic Nucleic Acid
cggggagcugcaggaga

SEQ ID NO: 1366 - RNA, 17 nt, Artificial Sequence
  Description of Artificial Sequence:  Enzymatic Nucleic Acid
ggagcugcaggagagcc

SEQ ID NO: 1367 - RNA, 17 nt, Artificial Sequence
  Description of Artificial Sequence:  Enzymatic Nucleic Acid
aggagagccagagucgc

SEQ ID NO: 1368 - RNA, 17 nt, Artificial Sequence
  Description of Artificial Sequence:  Enzymatic Nucleic Acid
ggagagccagagucgcu

SEQ ID NO: 1369 - RNA, 17 nt, Artificial Sequence
  Description of Artificial Sequence:  Enzymatic Nucleic Acid
agagucgcuuggaggcu

SEQ ID NO: 1370 - RNA, 17 nt, Artificial Sequence
  Description of Artificial Sequence:  Enzymatic Nucleic Acid
uuggaggcugccacuaa

SEQ ID NO: 1371 - RNA, 17 nt, Artificial Sequence
  Description of Artificial Sequence:  Enzymatic Nucleic Acid
gaggcugccacuaagga

SEQ ID NO: 1372 - RNA, 17 nt, Artificial Sequence
  Description of Artificial Sequence:  Enzymatic Nucleic Acid
aggcugccacuaaggaa

SEQ ID NO: 1373 - RNA, 17 nt, Artificial Sequence
  Description of Artificial Sequence:  Enzymatic Nucleic Acid
gcugccacuaaggaaug

SEQ ID NO: 1374 - RNA, 17 nt, Artificial Sequence
  Description of Artificial Sequence:  Enzymatic Nucleic Acid
aggaaugccaggcucug

SEQ ID NO: 1375 - RNA, 17 nt, Artificial Sequence
  Description of Artificial Sequence:  Enzymatic Nucleic Acid
ggaaugccaggcucugg

SEQ ID NO: 1376 - RNA, 17 nt, Artificial Sequence
  Description of Artificial Sequence:  Enzymatic Nucleic Acid
ugccaggcucuggaggg

SEQ ID NO: 1377 - RNA, 17 nt, Artificial Sequence
  Description of Artificial Sequence:  Enzymatic Nucleic Acid
ccaggcucuggaggguc

SEQ ID NO: 1378 - RNA, 17 nt, Artificial Sequence
  Description of Artificial Sequence:  Enzymatic Nucleic Acid
ggucgggcccgggcggc

SEQ ID NO: 1379 - RNA, 17 nt, Artificial Sequence
  Description of Artificial Sequence:  Enzymatic Nucleic Acid
gucgggcccgggcggcc

SEQ ID NO: 1380 - RNA, 17 nt, Artificial Sequence
  Description of Artificial Sequence:  Enzymatic Nucleic Acid
cgggcggccagcgagca

SEQ ID NO: 1381 - RNA, 17 nt, Artificial Sequence
  Description of Artificial Sequence:  Enzymatic Nucleic Acid
gggcggccagcgagcag

SEQ ID NO: 1382 - RNA, 17 nt, Artificial Sequence
  Description of Artificial Sequence:  Enzymatic Nucleic Acid
cagcgagcaggcgcggc

SEQ ID NO: 1383 - RNA, 17 nt, Artificial Sequence
  Description of Artificial Sequence:  Enzymatic Nucleic Acid
ggcgcggcagcuggaga

SEQ ID NO: 1384 - RNA, 17 nt, Artificial Sequence
  Description of Artificial Sequence:  Enzymatic Nucleic Acid
gcggcagcuggagagug

SEQ ID NO: 1385 - RNA, 17 nt, Artificial Sequence
  Description of Artificial Sequence:  Enzymatic Nucleic Acid
cgaggcgcugcagcagc

SEQ ID NO: 1386 - RNA, 17 nt, Artificial Sequence
  Description of Artificial Sequence:  Enzymatic Nucleic Acid
ggcgcugcagcagcagc

SEQ ID NO: 1387 - RNA, 17 nt, Artificial Sequence
  Description of Artificial Sequence:  Enzymatic Nucleic Acid
gcugcagcagcagcaca

SEQ ID NO: 1388 - RNA, 17 nt, Artificial Sequence
  Description of Artificial Sequence:  Enzymatic Nucleic Acid
gcagcagcagcacagcg

SEQ ID NO: 1389 - RNA, 17 nt, Artificial Sequence
  Description of Artificial Sequence:  Enzymatic Nucleic Acid
gcagcagcacagcgugc

SEQ ID NO: 1390 - RNA, 17 nt, Artificial Sequence
  Description of Artificial Sequence:  Enzymatic Nucleic Acid
agcagcacagcgugcag

SEQ ID NO: 1391 - RNA, 17 nt, Artificial Sequence
  Description of Artificial Sequence:  Enzymatic Nucleic Acid
cagcgugcagguggacc

SEQ ID NO: 1392 - RNA, 17 nt, Artificial Sequence
  Description of Artificial Sequence:  Enzymatic Nucleic Acid
agguggaccagcugcgc

SEQ ID NO: 1393 - RNA, 17 nt, Artificial Sequence
  Description of Artificial Sequence:  Enzymatic Nucleic Acid
gguggaccagcugcgca

SEQ ID NO: 1394 - RNA, 17 nt, Artificial Sequence
  Description of Artificial Sequence:  Enzymatic Nucleic Acid
ggaccagcugcgcaugc

SEQ ID NO: 1395 - RNA, 17 nt, Artificial Sequence
  Description of Artificial Sequence:  Enzymatic Nucleic Acid
agcugcgcaugcagggc

SEQ ID NO: 1396 - RNA, 17 nt, Artificial Sequence
  Description of Artificial Sequence:  Enzymatic Nucleic Acid
gcgcaugcagggccaga

SEQ ID NO: 1397 - RNA, 17 nt, Artificial Sequence
  Description of Artificial Sequence:  Enzymatic Nucleic Acid
ugcagggccagagcgug

SEQ ID NO: 1398 - RNA, 17 nt, Artificial Sequence
  Description of Artificial Sequence:  Enzymatic Nucleic Acid
gcagggccagagcgugg

SEQ ID NO: 1399 - RNA, 17 nt, Artificial Sequence
  Description of Artificial Sequence:  Enzymatic Nucleic Acid
guggaggccgcgcuccg

SEQ ID NO: 1400 - RNA, 17 nt, Artificial Sequence
  Description of Artificial Sequence:  Enzymatic Nucleic Acid
ggccgcgcuccgcaugg

SEQ ID NO: 1401 - RNA, 17 nt, Artificial Sequence
  Description of Artificial Sequence:  Enzymatic Nucleic Acid
ccgcgcuccgcauggag

SEQ ID NO: 1402 - RNA, 17 nt, Artificial Sequence
  Description of Artificial Sequence:  Enzymatic Nucleic Acid
cgcuccgcauggagcgc

SEQ ID NO: 1403 - RNA, 17 nt, Artificial Sequence
  Description of Artificial Sequence:  Enzymatic Nucleic Acid
uggagcgccaggccgcc

SEQ ID NO: 1404 - RNA, 17 nt, Artificial Sequence
  Description of Artificial Sequence:  Enzymatic Nucleic Acid
ggagcgccaggccgccu

SEQ ID NO: 1405 - RNA, 17 nt, Artificial Sequence
  Description of Artificial Sequence:  Enzymatic Nucleic Acid
cgccaggccgccucgga

SEQ ID NO: 1406 - RNA, 17 nt, Artificial Sequence
  Description of Artificial Sequence:  Enzymatic Nucleic Acid
caggccgccucggagga

SEQ ID NO: 1407 - RNA, 17 nt, Artificial Sequence
  Description of Artificial Sequence:  Enzymatic Nucleic Acid
aggccgccucggaggag

SEQ ID NO: 1408 - RNA, 17 nt, Artificial Sequence
  Description of Artificial Sequence:  Enzymatic Nucleic Acid
gaggaagcuggcccagu

SEQ ID NO: 1409 - RNA, 17 nt, Artificial Sequence
  Description of Artificial Sequence:  Enzymatic Nucleic Acid
aagcuggcccaguugca

SEQ ID NO: 1410 - RNA, 17 nt, Artificial Sequence
  Description of Artificial Sequence:  Enzymatic Nucleic Acid
agcuggcccaguugcag

SEQ ID NO: 1411 - RNA, 17 nt, Artificial Sequence
  Description of Artificial Sequence:  Enzymatic Nucleic Acid
gcuggcccaguugcagg

SEQ ID NO: 1412 - RNA, 17 nt, Artificial Sequence
  Description of Artificial Sequence:  Enzymatic Nucleic Acid
ccaguugcagguggccu

SEQ ID NO: 1413 - RNA, 17 nt, Artificial Sequence
  Description of Artificial Sequence:  Enzymatic Nucleic Acid
cagguggccuaucacca

SEQ ID NO: 1414 - RNA, 17 nt, Artificial Sequence
  Description of Artificial Sequence:  Enzymatic Nucleic Acid
agguggccuaucaccag

SEQ ID NO: 1415 - RNA, 17 nt, Artificial Sequence
  Description of Artificial Sequence:  Enzymatic Nucleic Acid
ggccuaucaccagcucu

SEQ ID NO: 1416 - RNA, 17 nt, Artificial Sequence
  Description of Artificial Sequence:  Enzymatic Nucleic Acid
ccuaucaccagcucuuc

SEQ ID NO: 1417 - RNA, 17 nt, Artificial Sequence
  Description of Artificial Sequence:  Enzymatic Nucleic Acid
cuaucaccagcucuucc

SEQ ID NO: 1418 - RNA, 17 nt, Artificial Sequence
  Description of Artificial Sequence:  Enzymatic Nucleic Acid
ucaccagcucuuccaag

SEQ ID NO: 1419 - RNA, 17 nt, Artificial Sequence
  Description of Artificial Sequence:  Enzymatic Nucleic Acid
accagcucuuccaagaa

SEQ ID NO: 1420 - RNA, 17 nt, Artificial Sequence
  Description of Artificial Sequence:  Enzymatic Nucleic Acid
agcucuuccaagaauac

SEQ ID NO: 1421 - RNA, 17 nt, Artificial Sequence
  Description of Artificial Sequence:  Enzymatic Nucleic Acid
gcucuuccaagaauacg

SEQ ID NO: 1422 - RNA, 17 nt, Artificial Sequence
  Description of Artificial Sequence:  Enzymatic Nucleic Acid
aauacgacaaccacauc

SEQ ID NO: 1423 - RNA, 17 nt, Artificial Sequence
  Description of Artificial Sequence:  Enzymatic Nucleic Acid
acgacaaccacaucaag

SEQ ID NO: 1424 - RNA, 17 nt, Artificial Sequence
  Description of Artificial Sequence:  Enzymatic Nucleic Acid
cgacaaccacaucaaga

SEQ ID NO: 1425 - RNA, 17 nt, Artificial Sequence
  Description of Artificial Sequence:  Enzymatic Nucleic Acid
acaaccacaucaagagc

SEQ ID NO: 1426 - RNA, 17 nt, Artificial Sequence
  Description of Artificial Sequence:  Enzymatic Nucleic Acid
accacaucaagagcagc

SEQ ID NO: 1427 - RNA, 17 nt, Artificial Sequence
  Description of Artificial Sequence:  Enzymatic Nucleic Acid
ucaagagcagcguggug

SEQ ID NO: 1428 - RNA, 17 nt, Artificial Sequence
  Description of Artificial Sequence:  Enzymatic Nucleic Acid
uggugggcagugagcgg

SEQ ID NO: 1429 - RNA, 17 nt, Artificial Sequence
  Description of Artificial Sequence:  Enzymatic Nucleic Acid
aggaaugcagcuggaag

SEQ ID NO: 1430 - RNA, 17 nt, Artificial Sequence
  Description of Artificial Sequence:  Enzymatic Nucleic Acid
aaugcagcuggaagauc

SEQ ID NO: 1431 - RNA, 17 nt, Artificial Sequence
  Description of Artificial Sequence:  Enzymatic Nucleic Acid
ggaagaucucaaacagc

SEQ ID NO: 1432 - RNA, 17 nt, Artificial Sequence
  Description of Artificial Sequence:  Enzymatic Nucleic Acid
aagaucucaaacagcag

SEQ ID NO: 1433 - RNA, 17 nt, Artificial Sequence
  Description of Artificial Sequence:  Enzymatic Nucleic Acid
ucucaaacagcagcucc

SEQ ID NO: 1434 - RNA, 17 nt, Artificial Sequence
  Description of Artificial Sequence:  Enzymatic Nucleic Acid
caaacagcagcuccagc

SEQ ID NO: 1435 - RNA, 17 nt, Artificial Sequence
  Description of Artificial Sequence:  Enzymatic Nucleic Acid
acagcagcuccagcagg

SEQ ID NO: 1436 - RNA, 17 nt, Artificial Sequence
  Description of Artificial Sequence:  Enzymatic Nucleic Acid
agcagcuccagcaggcc

SEQ ID NO: 1437 - RNA, 17 nt, Artificial Sequence
  Description of Artificial Sequence:  Enzymatic Nucleic Acid
gcagcuccagcaggccg

SEQ ID NO: 1438 - RNA, 17 nt, Artificial Sequence
  Description of Artificial Sequence:  Enzymatic Nucleic Acid
gcuccagcaggccgagg

SEQ ID NO: 1439 - RNA, 17 nt, Artificial Sequence
  Description of Artificial Sequence:  Enzymatic Nucleic Acid
cagcaggccgaggaggc

SEQ ID NO: 1440 - RNA, 17 nt, Artificial Sequence
  Description of Artificial Sequence:  Enzymatic Nucleic Acid
gaggaggcccugguggc

SEQ ID NO: 1441 - RNA, 17 nt, Artificial Sequence
  Description of Artificial Sequence:  Enzymatic Nucleic Acid
aggaggcccugguggcc

SEQ ID NO: 1442 - RNA, 17 nt, Artificial Sequence
  Description of Artificial Sequence:  Enzymatic Nucleic Acid
ggaggcccugguggcca

SEQ ID NO: 1443 - RNA, 17 nt, Artificial Sequence
  Description of Artificial Sequence:  Enzymatic Nucleic Acid
cugguggccaaacagga

SEQ ID NO: 1444 - RNA, 17 nt, Artificial Sequence
  Description of Artificial Sequence:  Enzymatic Nucleic Acid
ugguggccaaacaggag

SEQ ID NO: 1445 - RNA, 17 nt, Artificial Sequence
  Description of Artificial Sequence:  Enzymatic Nucleic Acid
ggccaaacaggagguga

SEQ ID NO: 1446 - RNA, 17 nt, Artificial Sequence
  Description of Artificial Sequence:  Enzymatic Nucleic Acid
cgauaagcugaaggagg

SEQ ID NO: 1447 - RNA, 17 nt, Artificial Sequence
  Description of Artificial Sequence:  Enzymatic Nucleic Acid
gaggaggccgagcagca

SEQ ID NO: 1448 - RNA, 17 nt, Artificial Sequence
  Description of Artificial Sequence:  Enzymatic Nucleic Acid
ggccgagcagcacaaga

SEQ ID NO: 1449 - RNA, 17 nt, Artificial Sequence
  Description of Artificial Sequence:  Enzymatic Nucleic Acid
cgagcagcacaagauug

SEQ ID NO: 1450 - RNA, 17 nt, Artificial Sequence
  Description of Artificial Sequence:  Enzymatic Nucleic Acid
agcagcacaagauugug

SEQ ID NO: 1451 - RNA, 17 nt, Artificial Sequence
  Description of Artificial Sequence:  Enzymatic Nucleic Acid
auggagaccguuccggu

SEQ ID NO: 1452 - RNA, 17 nt, Artificial Sequence
  Description of Artificial Sequence:  Enzymatic Nucleic Acid
gaccguuccggugcuga

SEQ ID NO: 1453 - RNA, 17 nt, Artificial Sequence
  Description of Artificial Sequence:  Enzymatic Nucleic Acid
uccggugcugaaggccc

SEQ ID NO: 1454 - RNA, 17 nt, Artificial Sequence
  Description of Artificial Sequence:  Enzymatic Nucleic Acid
cugaaggcccaggcgga

SEQ ID NO: 1455 - RNA, 17 nt, Artificial Sequence
  Description of Artificial Sequence:  Enzymatic Nucleic Acid
ugaaggcccaggcggau

SEQ ID NO: 1456 - RNA, 17 nt, Artificial Sequence
  Description of Artificial Sequence:  Enzymatic Nucleic Acid
gaaggcccaggcggaua

SEQ ID NO: 1457 - RNA, 17 nt, Artificial Sequence
  Description of Artificial Sequence:  Enzymatic Nucleic Acid
cggauaucuacaaggcg

SEQ ID NO: 1458 - RNA, 17 nt, Artificial Sequence
  Description of Artificial Sequence:  Enzymatic Nucleic Acid
auaucuacaaggcggac

SEQ ID NO: 1459 - RNA, 17 nt, Artificial Sequence
  Description of Artificial Sequence:  Enzymatic Nucleic Acid
aggcggacuuccaggcu

SEQ ID NO: 1460 - RNA, 17 nt, Artificial Sequence
  Description of Artificial Sequence:  Enzymatic Nucleic Acid
cggacuuccaggcugag

SEQ ID NO: 1461 - RNA, 17 nt, Artificial Sequence
  Description of Artificial Sequence:  Enzymatic Nucleic Acid
ggacuuccaggcugaga

SEQ ID NO: 1462 - RNA, 17 nt, Artificial Sequence
  Description of Artificial Sequence:  Enzymatic Nucleic Acid
uuccaggcugagaggca

SEQ ID NO: 1463 - RNA, 17 nt, Artificial Sequence
  Description of Artificial Sequence:  Enzymatic Nucleic Acid
ugagaggcaggcccggg

SEQ ID NO: 1464 - RNA, 17 nt, Artificial Sequence
  Description of Artificial Sequence:  Enzymatic Nucleic Acid
aggcaggcccgggagaa

SEQ ID NO: 1465 - RNA, 17 nt, Artificial Sequence
  Description of Artificial Sequence:  Enzymatic Nucleic Acid
ggcaggcccgggagaag

SEQ ID NO: 1466 - RNA, 17 nt, Artificial Sequence
  Description of Artificial Sequence:  Enzymatic Nucleic Acid
ggagaagcuggccgaga

SEQ ID NO: 1467 - RNA, 17 nt, Artificial Sequence
  Description of Artificial Sequence:  Enzymatic Nucleic Acid
aagcuggccgagaagaa

SEQ ID NO: 1468 - RNA, 17 nt, Artificial Sequence
  Description of Artificial Sequence:  Enzymatic Nucleic Acid
gaaggagcuccugcagg

SEQ ID NO: 1469 - RNA, 17 nt, Artificial Sequence
  Description of Artificial Sequence:  Enzymatic Nucleic Acid
aggagcuccugcaggag

SEQ ID NO: 1470 - RNA, 17 nt, Artificial Sequence
  Description of Artificial Sequence:  Enzymatic Nucleic Acid
ggagcuccugcaggagc

SEQ ID NO: 1471 - RNA, 17 nt, Artificial Sequence
  Description of Artificial Sequence:  Enzymatic Nucleic Acid
gcuccugcaggagcagc

SEQ ID NO: 1472 - RNA, 17 nt, Artificial Sequence
  Description of Artificial Sequence:  Enzymatic Nucleic Acid
gcaggagcagcuggagc

SEQ ID NO: 1473 - RNA, 17 nt, Artificial Sequence
  Description of Artificial Sequence:  Enzymatic Nucleic Acid
ggagcagcuggagcagc

SEQ ID NO: 1474 - RNA, 17 nt, Artificial Sequence
  Description of Artificial Sequence:  Enzymatic Nucleic Acid
gcuggagcagcugcaga

SEQ ID NO: 1475 - RNA, 17 nt, Artificial Sequence
  Description of Artificial Sequence:  Enzymatic Nucleic Acid
ggagcagcugcagaggg

SEQ ID NO: 1476 - RNA, 17 nt, Artificial Sequence
  Description of Artificial Sequence:  Enzymatic Nucleic Acid
gcagcugcagagggagu

SEQ ID NO: 1477 - RNA, 17 nt, Artificial Sequence
  Description of Artificial Sequence:  Enzymatic Nucleic Acid
gggaguacagcaaacug

SEQ ID NO: 1478 - RNA, 17 nt, Artificial Sequence
  Description of Artificial Sequence:  Enzymatic Nucleic Acid
aguacagcaaacugaag

SEQ ID NO: 1479 - RNA, 17 nt, Artificial Sequence
  Description of Artificial Sequence:  Enzymatic Nucleic Acid
cagcaaacugaaggcca

SEQ ID NO: 1480 - RNA, 17 nt, Artificial Sequence
  Description of Artificial Sequence:  Enzymatic Nucleic Acid
cugaaggccagcuguca

SEQ ID NO: 1481 - RNA, 17 nt, Artificial Sequence
  Description of Artificial Sequence:  Enzymatic Nucleic Acid
ugaaggccagcugucag

SEQ ID NO: 1482 - RNA, 17 nt, Artificial Sequence
  Description of Artificial Sequence:  Enzymatic Nucleic Acid
aggccagcugucaggag

SEQ ID NO: 1483 - RNA, 17 nt, Artificial Sequence
  Description of Artificial Sequence:  Enzymatic Nucleic Acid
cagcugucaggagucgg

SEQ ID NO: 1484 - RNA, 17 nt, Artificial Sequence
  Description of Artificial Sequence:  Enzymatic Nucleic Acid
gagucggccaggaucga

SEQ ID NO: 1485 - RNA, 17 nt, Artificial Sequence
  Description of Artificial Sequence:  Enzymatic Nucleic Acid
agucggccaggaucgag

SEQ ID NO: 1486 - RNA, 17 nt, Artificial Sequence
  Description of Artificial Sequence:  Enzymatic Nucleic Acid
ucgaggacaugaggaag

SEQ ID NO: 1487 - RNA, 17 nt, Artificial Sequence
  Description of Artificial Sequence:  Enzymatic Nucleic Acid
gaagcggcaugucgagg

SEQ ID NO: 1488 - RNA, 17 nt, Artificial Sequence
  Description of Artificial Sequence:  Enzymatic Nucleic Acid
ucgaggucucccaggcc

SEQ ID NO: 1489 - RNA, 17 nt, Artificial Sequence
  Description of Artificial Sequence:  Enzymatic Nucleic Acid
gaggucucccaggcccc

SEQ ID NO: 1490 - RNA, 17 nt, Artificial Sequence
  Description of Artificial Sequence:  Enzymatic Nucleic Acid
aggucucccaggccccc

SEQ ID NO: 1491 - RNA, 17 nt, Artificial Sequence
  Description of Artificial Sequence:  Enzymatic Nucleic Acid
ggucucccaggcccccu

SEQ ID NO: 1492 - RNA, 17 nt, Artificial Sequence
  Description of Artificial Sequence:  Enzymatic Nucleic Acid
ucccaggcccccuugcc

SEQ ID NO: 1493 - RNA, 17 nt, Artificial Sequence
  Description of Artificial Sequence:  Enzymatic Nucleic Acid
cccaggcccccuugccc

SEQ ID NO: 1494 - RNA, 17 nt, Artificial Sequence
  Description of Artificial Sequence:  Enzymatic Nucleic Acid
ccaggcccccuugcccc

SEQ ID NO: 1495 - RNA, 17 nt, Artificial Sequence
  Description of Artificial Sequence:  Enzymatic Nucleic Acid
caggcccccuugccccc

SEQ ID NO: 1496 - RNA, 17 nt, Artificial Sequence
  Description of Artificial Sequence:  Enzymatic Nucleic Acid
aggcccccuugcccccc

SEQ ID NO: 1497 - RNA, 17 nt, Artificial Sequence
  Description of Artificial Sequence:  Enzymatic Nucleic Acid
ccccuugccccccgccc

SEQ ID NO: 1498 - RNA, 17 nt, Artificial Sequence
  Description of Artificial Sequence:  Enzymatic Nucleic Acid
cccuugccccccgcccc

SEQ ID NO: 1499 - RNA, 17 nt, Artificial Sequence
  Description of Artificial Sequence:  Enzymatic Nucleic Acid
ccuugccccccgccccu

SEQ ID NO: 1500 - RNA, 17 nt, Artificial Sequence
  Description of Artificial Sequence:  Enzymatic Nucleic Acid
cuugccccccgccccug

SEQ ID NO: 1501 - RNA, 17 nt, Artificial Sequence
  Description of Artificial Sequence:  Enzymatic Nucleic Acid
uugccccccgccccugc

SEQ ID NO: 1502 - RNA, 17 nt, Artificial Sequence
  Description of Artificial Sequence:  Enzymatic Nucleic Acid
ccccccgccccugccua

SEQ ID NO: 1503 - RNA, 17 nt, Artificial Sequence
  Description of Artificial Sequence:  Enzymatic Nucleic Acid
cccccgccccugccuac

SEQ ID NO: 1504 - RNA, 17 nt, Artificial Sequence
  Description of Artificial Sequence:  Enzymatic Nucleic Acid
ccccgccccugccuacc

SEQ ID NO: 1505 - RNA, 17 nt, Artificial Sequence
  Description of Artificial Sequence:  Enzymatic Nucleic Acid
cccgccccugccuaccu

SEQ ID NO: 1506 - RNA, 17 nt, Artificial Sequence
  Description of Artificial Sequence:  Enzymatic Nucleic Acid
gccccugccuaccucuc

SEQ ID NO: 1507 - RNA, 17 nt, Artificial Sequence
  Description of Artificial Sequence:  Enzymatic Nucleic Acid
ccccugccuaccucucc

SEQ ID NO: 1508 - RNA, 17 nt, Artificial Sequence
  Description of Artificial Sequence:  Enzymatic Nucleic Acid
cugccuaccucuccucu

SEQ ID NO: 1509 - RNA, 17 nt, Artificial Sequence
  Description of Artificial Sequence:  Enzymatic Nucleic Acid
ugccuaccucuccucuc

SEQ ID NO: 1510 - RNA, 17 nt, Artificial Sequence
  Description of Artificial Sequence:  Enzymatic Nucleic Acid
ccuaccucuccucuccc

SEQ ID NO: 1511 - RNA, 17 nt, Artificial Sequence
  Description of Artificial Sequence:  Enzymatic Nucleic Acid
uaccucuccucuccccu

SEQ ID NO: 1512 - RNA, 17 nt, Artificial Sequence
  Description of Artificial Sequence:  Enzymatic Nucleic Acid
accucuccucuccccug

SEQ ID NO: 1513 - RNA, 17 nt, Artificial Sequence
  Description of Artificial Sequence:  Enzymatic Nucleic Acid
cucuccucuccccuggc

SEQ ID NO: 1514 - RNA, 17 nt, Artificial Sequence
  Description of Artificial Sequence:  Enzymatic Nucleic Acid
cuccucuccccuggccc

SEQ ID NO: 1515 - RNA, 17 nt, Artificial Sequence
  Description of Artificial Sequence:  Enzymatic Nucleic Acid
uccucuccccuggcccu

SEQ ID NO: 1516 - RNA, 17 nt, Artificial Sequence
  Description of Artificial Sequence:  Enzymatic Nucleic Acid
ccucuccccuggcccug

SEQ ID NO: 1517 - RNA, 17 nt, Artificial Sequence
  Description of Artificial Sequence:  Enzymatic Nucleic Acid
cucuccccuggcccugc

SEQ ID NO: 1518 - RNA, 17 nt, Artificial Sequence
  Description of Artificial Sequence:  Enzymatic Nucleic Acid
ccccuggcccugcccag

SEQ ID NO: 1519 - RNA, 17 nt, Artificial Sequence
  Description of Artificial Sequence:  Enzymatic Nucleic Acid
cccuggcccugcccagc

SEQ ID NO: 1520 - RNA, 17 nt, Artificial Sequence
  Description of Artificial Sequence:  Enzymatic Nucleic Acid
ccuggcccugcccagcc

SEQ ID NO: 1521 - RNA, 17 nt, Artificial Sequence
  Description of Artificial Sequence:  Enzymatic Nucleic Acid
ggcccugcccagccaga

SEQ ID NO: 1522 - RNA, 17 nt, Artificial Sequence
  Description of Artificial Sequence:  Enzymatic Nucleic Acid
gcccugcccagccagag

SEQ ID NO: 1523 - RNA, 17 nt, Artificial Sequence
  Description of Artificial Sequence:  Enzymatic Nucleic Acid
cccugcccagccagagg

SEQ ID NO: 1524 - RNA, 17 nt, Artificial Sequence
  Description of Artificial Sequence:  Enzymatic Nucleic Acid
ugcccagccagaggagg

SEQ ID NO: 1525 - RNA, 17 nt, Artificial Sequence
  Description of Artificial Sequence:  Enzymatic Nucleic Acid
gcccagccagaggagga

SEQ ID NO: 1526 - RNA, 17 nt, Artificial Sequence
  Description of Artificial Sequence:  Enzymatic Nucleic Acid
ggaggagcccccccgag

SEQ ID NO: 1527 - RNA, 17 nt, Artificial Sequence
  Description of Artificial Sequence:  Enzymatic Nucleic Acid
gaggagcccccccgagg

SEQ ID NO: 1528 - RNA, 17 nt, Artificial Sequence
  Description of Artificial Sequence:  Enzymatic Nucleic Acid
aggagcccccccgagga

SEQ ID NO: 1529 - RNA, 17 nt, Artificial Sequence
  Description of Artificial Sequence:  Enzymatic Nucleic Acid
ggagcccccccgaggag

SEQ ID NO: 1530 - RNA, 17 nt, Artificial Sequence
  Description of Artificial Sequence:  Enzymatic Nucleic Acid
gagcccccccgaggagc

SEQ ID NO: 1531 - RNA, 17 nt, Artificial Sequence
  Description of Artificial Sequence:  Enzymatic Nucleic Acid
agcccccccgaggagcc

SEQ ID NO: 1532 - RNA, 17 nt, Artificial Sequence
  Description of Artificial Sequence:  Enzymatic Nucleic Acid
cgaggagccaccugacu

SEQ ID NO: 1533 - RNA, 17 nt, Artificial Sequence
  Description of Artificial Sequence:  Enzymatic Nucleic Acid
gaggagccaccugacuu

SEQ ID NO: 1534 - RNA, 17 nt, Artificial Sequence
  Description of Artificial Sequence:  Enzymatic Nucleic Acid
ggagccaccugacuucu

SEQ ID NO: 1535 - RNA, 17 nt, Artificial Sequence
  Description of Artificial Sequence:  Enzymatic Nucleic Acid
gagccaccugacuucug

SEQ ID NO: 1536 - RNA, 17 nt, Artificial Sequence
  Description of Artificial Sequence:  Enzymatic Nucleic Acid
caccugacuucugcugu

SEQ ID NO: 1537 - RNA, 17 nt, Artificial Sequence
  Description of Artificial Sequence:  Enzymatic Nucleic Acid
cugacuucugcuguccc

SEQ ID NO: 1538 - RNA, 17 nt, Artificial Sequence
  Description of Artificial Sequence:  Enzymatic Nucleic Acid
acuucugcugucccaag

SEQ ID NO: 1539 - RNA, 17 nt, Artificial Sequence
  Description of Artificial Sequence:  Enzymatic Nucleic Acid
cugcugucccaagugcc

SEQ ID NO: 1540 - RNA, 17 nt, Artificial Sequence
  Description of Artificial Sequence:  Enzymatic Nucleic Acid
ugcugucccaagugcca

SEQ ID NO: 1541 - RNA, 17 nt, Artificial Sequence
  Description of Artificial Sequence:  Enzymatic Nucleic Acid
gcugucccaagugccag

SEQ ID NO: 1542 - RNA, 17 nt, Artificial Sequence
  Description of Artificial Sequence:  Enzymatic Nucleic Acid
ccaagugccaguaucag

SEQ ID NO: 1543 - RNA, 17 nt, Artificial Sequence
  Description of Artificial Sequence:  Enzymatic Nucleic Acid
caagugccaguaucagg

SEQ ID NO: 1544 - RNA, 17 nt, Artificial Sequence
  Description of Artificial Sequence:  Enzymatic Nucleic Acid
ccaguaucaggccccug

SEQ ID NO: 1545 - RNA, 17 nt, Artificial Sequence
  Description of Artificial Sequence:  Enzymatic Nucleic Acid
uaucaggccccugauau

SEQ ID NO: 1546 - RNA, 17 nt, Artificial Sequence
  Description of Artificial Sequence:  Enzymatic Nucleic Acid
aucaggccccugauaug

SEQ ID NO: 1547 - RNA, 17 nt, Artificial Sequence
  Description of Artificial Sequence:  Enzymatic Nucleic Acid
ucaggccccugauaugg

SEQ ID NO: 1548 - RNA, 17 nt, Artificial Sequence
  Description of Artificial Sequence:  Enzymatic Nucleic Acid
caggccccugauaugga

SEQ ID NO: 1549 - RNA, 17 nt, Artificial Sequence
  Description of Artificial Sequence:  Enzymatic Nucleic Acid
auauggacacccugcag

SEQ ID NO: 1550 - RNA, 17 nt, Artificial Sequence
  Description of Artificial Sequence:  Enzymatic Nucleic Acid
auggacacccugcagau

SEQ ID NO: 1551 - RNA, 17 nt, Artificial Sequence
  Description of Artificial Sequence:  Enzymatic Nucleic Acid
uggacacccugcagaua

SEQ ID NO: 1552 - RNA, 17 nt, Artificial Sequence
  Description of Artificial Sequence:  Enzymatic Nucleic Acid
ggacacccugcagauac

SEQ ID NO: 1553 - RNA, 17 nt, Artificial Sequence
  Description of Artificial Sequence:  Enzymatic Nucleic Acid
cacccugcagauacaug

SEQ ID NO: 1554 - RNA, 17 nt, Artificial Sequence
  Description of Artificial Sequence:  Enzymatic Nucleic Acid
gcagauacaugucaugg

SEQ ID NO: 1555 - RNA, 17 nt, Artificial Sequence
  Description of Artificial Sequence:  Enzymatic Nucleic Acid
uacaugucauggagugc

SEQ ID NO: 1556 - RNA, 17 nt, Artificial Sequence
  Description of Artificial Sequence:  Enzymatic Nucleic Acid
uggagugcauugaguag

SEQ ID NO: 1557 - RNA, 17 nt, Artificial Sequence
  Description of Artificial Sequence:  Enzymatic Nucleic Acid
aguagggccggccagug

SEQ ID NO: 1558 - RNA, 17 nt, Artificial Sequence
  Description of Artificial Sequence:  Enzymatic Nucleic Acid
gggccggccagugcaag

SEQ ID NO: 1559 - RNA, 17 nt, Artificial Sequence
  Description of Artificial Sequence:  Enzymatic Nucleic Acid
ggccggccagugcaagg

SEQ ID NO: 1560 - RNA, 17 nt, Artificial Sequence
  Description of Artificial Sequence:  Enzymatic Nucleic Acid
gccagugcaaggccacu

SEQ ID NO: 1561 - RNA, 17 nt, Artificial Sequence
  Description of Artificial Sequence:  Enzymatic Nucleic Acid
ugcaaggccacugccug

SEQ ID NO: 1562 - RNA, 17 nt, Artificial Sequence
  Description of Artificial Sequence:  Enzymatic Nucleic Acid
gcaaggccacugccugc

SEQ ID NO: 1563 - RNA, 17 nt, Artificial Sequence
  Description of Artificial Sequence:  Enzymatic Nucleic Acid
aaggccacugccugccc

SEQ ID NO: 1564 - RNA, 17 nt, Artificial Sequence
  Description of Artificial Sequence:  Enzymatic Nucleic Acid
gccacugccugcccgag

SEQ ID NO: 1565 - RNA, 17 nt, Artificial Sequence
  Description of Artificial Sequence:  Enzymatic Nucleic Acid
ccacugccugcccgagg

SEQ ID NO: 1566 - RNA, 17 nt, Artificial Sequence
  Description of Artificial Sequence:  Enzymatic Nucleic Acid
cugccugcccgaggacg

SEQ ID NO: 1567 - RNA, 17 nt, Artificial Sequence
  Description of Artificial Sequence:  Enzymatic Nucleic Acid
ugccugcccgaggacgu

SEQ ID NO: 1568 - RNA, 17 nt, Artificial Sequence
  Description of Artificial Sequence:  Enzymatic Nucleic Acid
ggacgugcccgggaccg

SEQ ID NO: 1569 - RNA, 17 nt, Artificial Sequence
  Description of Artificial Sequence:  Enzymatic Nucleic Acid
gacgugcccgggaccgu

SEQ ID NO: 1570 - RNA, 17 nt, Artificial Sequence
  Description of Artificial Sequence:  Enzymatic Nucleic Acid
cccgggaccgugcaguc

SEQ ID NO: 1571 - RNA, 17 nt, Artificial Sequence
  Description of Artificial Sequence:  Enzymatic Nucleic Acid
gaccgugcagucugcgc

SEQ ID NO: 1572 - RNA, 17 nt, Artificial Sequence
  Description of Artificial Sequence:  Enzymatic Nucleic Acid
gugcagucugcgcuuuc

SEQ ID NO: 1573 - RNA, 17 nt, Artificial Sequence
  Description of Artificial Sequence:  Enzymatic Nucleic Acid
gucugcgcuuuccucuc

SEQ ID NO: 1574 - RNA, 17 nt, Artificial Sequence
  Description of Artificial Sequence:  Enzymatic Nucleic Acid
gcgcuuuccucucccgc

SEQ ID NO: 1575 - RNA, 17 nt, Artificial Sequence
  Description of Artificial Sequence:  Enzymatic Nucleic Acid
cgcuuuccucucccgcc

SEQ ID NO: 1576 - RNA, 17 nt, Artificial Sequence
  Description of Artificial Sequence:  Enzymatic Nucleic Acid
cuuuccucucccgccug

SEQ ID NO: 1577 - RNA, 17 nt, Artificial Sequence
  Description of Artificial Sequence:  Enzymatic Nucleic Acid
uuccucucccgccugcc

SEQ ID NO: 1578 - RNA, 17 nt, Artificial Sequence
  Description of Artificial Sequence:  Enzymatic Nucleic Acid
uccucucccgccugccu

SEQ ID NO: 1579 - RNA, 17 nt, Artificial Sequence
  Description of Artificial Sequence:  Enzymatic Nucleic Acid
ucucccgccugccuagc

SEQ ID NO: 1580 - RNA, 17 nt, Artificial Sequence
  Description of Artificial Sequence:  Enzymatic Nucleic Acid
cucccgccugccuagcc

SEQ ID NO: 1581 - RNA, 17 nt, Artificial Sequence
  Description of Artificial Sequence:  Enzymatic Nucleic Acid
ccgccugccuagcccag

SEQ ID NO: 1582 - RNA, 17 nt, Artificial Sequence
  Description of Artificial Sequence:  Enzymatic Nucleic Acid
cgccugccuagcccagg

SEQ ID NO: 1583 - RNA, 17 nt, Artificial Sequence
  Description of Artificial Sequence:  Enzymatic Nucleic Acid
ugccuagcccaggauga

SEQ ID NO: 1584 - RNA, 17 nt, Artificial Sequence
  Description of Artificial Sequence:  Enzymatic Nucleic Acid
gccuagcccaggaugaa

SEQ ID NO: 1585 - RNA, 17 nt, Artificial Sequence
  Description of Artificial Sequence:  Enzymatic Nucleic Acid
ccuagcccaggaugaag

SEQ ID NO: 1586 - RNA, 17 nt, Artificial Sequence
  Description of Artificial Sequence:  Enzymatic Nucleic Acid
ugaagggcuggguggcc

SEQ ID NO: 1587 - RNA, 17 nt, Artificial Sequence
  Description of Artificial Sequence:  Enzymatic Nucleic Acid
uggguggccacaacugg

SEQ ID NO: 1588 - RNA, 17 nt, Artificial Sequence
  Description of Artificial Sequence:  Enzymatic Nucleic Acid
ggguggccacaacuggg

SEQ ID NO: 1589 - RNA, 17 nt, Artificial Sequence
  Description of Artificial Sequence:  Enzymatic Nucleic Acid
guggccacaacugggau

SEQ ID NO: 1590 - RNA, 17 nt, Artificial Sequence
  Description of Artificial Sequence:  Enzymatic Nucleic Acid
gccacaacugggaugcc

SEQ ID NO: 1591 - RNA, 17 nt, Artificial Sequence
  Description of Artificial Sequence:  Enzymatic Nucleic Acid
ugggaugccaccuggag

SEQ ID NO: 1592 - RNA, 17 nt, Artificial Sequence
  Description of Artificial Sequence:  Enzymatic Nucleic Acid
gggaugccaccuggagc

SEQ ID NO: 1593 - RNA, 17 nt, Artificial Sequence
  Description of Artificial Sequence:  Enzymatic Nucleic Acid
gaugccaccuggagccc

SEQ ID NO: 1594 - RNA, 17 nt, Artificial Sequence
  Description of Artificial Sequence:  Enzymatic Nucleic Acid
augccaccuggagcccc

SEQ ID NO: 1595 - RNA, 17 nt, Artificial Sequence
  Description of Artificial Sequence:  Enzymatic Nucleic Acid
ccuggagccccacccag

SEQ ID NO: 1596 - RNA, 17 nt, Artificial Sequence
  Description of Artificial Sequence:  Enzymatic Nucleic Acid
cuggagccccacccagg

SEQ ID NO: 1597 - RNA, 17 nt, Artificial Sequence
  Description of Artificial Sequence:  Enzymatic Nucleic Acid
uggagccccacccagga

SEQ ID NO: 1598 - RNA, 17 nt, Artificial Sequence
  Description of Artificial Sequence:  Enzymatic Nucleic Acid
ggagccccacccaggag

SEQ ID NO: 1599 - RNA, 17 nt, Artificial Sequence
  Description of Artificial Sequence:  Enzymatic Nucleic Acid
agccccacccaggagcu

SEQ ID NO: 1600 - RNA, 17 nt, Artificial Sequence
  Description of Artificial Sequence:  Enzymatic Nucleic Acid
gccccacccaggagcug

SEQ ID NO: 1601 - RNA, 17 nt, Artificial Sequence
  Description of Artificial Sequence:  Enzymatic Nucleic Acid
ccccacccaggagcugg

SEQ ID NO: 1602 - RNA, 17 nt, Artificial Sequence
  Description of Artificial Sequence:  Enzymatic Nucleic Acid
ccaggagcuggccgcgg

SEQ ID NO: 1603 - RNA, 17 nt, Artificial Sequence
  Description of Artificial Sequence:  Enzymatic Nucleic Acid
gagcuggccgcggcacc

SEQ ID NO: 1604 - RNA, 17 nt, Artificial Sequence
  Description of Artificial Sequence:  Enzymatic Nucleic Acid
gccgcggcaccuuacgc

SEQ ID NO: 1605 - RNA, 17 nt, Artificial Sequence
  Description of Artificial Sequence:  Enzymatic Nucleic Acid
cgcggcaccuuacgcuu

SEQ ID NO: 1606 - RNA, 17 nt, Artificial Sequence
  Description of Artificial Sequence:  Enzymatic Nucleic Acid
gcggcaccuuacgcuuc

SEQ ID NO: 1607 - RNA, 17 nt, Artificial Sequence
  Description of Artificial Sequence:  Enzymatic Nucleic Acid
ccuuacgcuucagcugu

SEQ ID NO: 1608 - RNA, 17 nt, Artificial Sequence
  Description of Artificial Sequence:  Enzymatic Nucleic Acid
uacgcuucagcuguuga

SEQ ID NO: 1609 - RNA, 17 nt, Artificial Sequence
  Description of Artificial Sequence:  Enzymatic Nucleic Acid
gcuucagcuguugaucc

SEQ ID NO: 1610 - RNA, 17 nt, Artificial Sequence
  Description of Artificial Sequence:  Enzymatic Nucleic Acid
uguugauccgcuggucc

SEQ ID NO: 1611 - RNA, 17 nt, Artificial Sequence
  Description of Artificial Sequence:  Enzymatic Nucleic Acid
ugauccgcugguccccu

SEQ ID NO: 1612 - RNA, 17 nt, Artificial Sequence
  Description of Artificial Sequence:  Enzymatic Nucleic Acid
cgcugguccccucuuuu

SEQ ID NO: 1613 - RNA, 17 nt, Artificial Sequence
  Description of Artificial Sequence:  Enzymatic Nucleic Acid
gcugguccccucuuuug

SEQ ID NO: 1614 - RNA, 17 nt, Artificial Sequence
  Description of Artificial Sequence:  Enzymatic Nucleic Acid
cugguccccucuuuugg

SEQ ID NO: 1615 - RNA, 17 nt, Artificial Sequence
  Description of Artificial Sequence:  Enzymatic Nucleic Acid
ugguccccucuuuuggg

SEQ ID NO: 1616 - RNA, 17 nt, Artificial Sequence
  Description of Artificial Sequence:  Enzymatic Nucleic Acid
guccccucuuuuggggu

SEQ ID NO: 1617 - RNA, 17 nt, Artificial Sequence
  Description of Artificial Sequence:  Enzymatic Nucleic Acid
gaugcggccccgaucag

SEQ ID NO: 1618 - RNA, 17 nt, Artificial Sequence
  Description of Artificial Sequence:  Enzymatic Nucleic Acid
augcggccccgaucagg

SEQ ID NO: 1619 - RNA, 17 nt, Artificial Sequence
  Description of Artificial Sequence:  Enzymatic Nucleic Acid
ugcggccccgaucaggc

SEQ ID NO: 1620 - RNA, 17 nt, Artificial Sequence
  Description of Artificial Sequence:  Enzymatic Nucleic Acid
ccccgaucaggccugac

SEQ ID NO: 1621 - RNA, 17 nt, Artificial Sequence
  Description of Artificial Sequence:  Enzymatic Nucleic Acid
gaucaggccugacucgc

SEQ ID NO: 1622 - RNA, 17 nt, Artificial Sequence
  Description of Artificial Sequence:  Enzymatic Nucleic Acid
aucaggccugacucgcu

SEQ ID NO: 1623 - RNA, 17 nt, Artificial Sequence
  Description of Artificial Sequence:  Enzymatic Nucleic Acid
ggccugacucgcugcuc

SEQ ID NO: 1624 - RNA, 17 nt, Artificial Sequence
  Description of Artificial Sequence:  Enzymatic Nucleic Acid
ugacucgcugcucuuuu

SEQ ID NO: 1625 - RNA, 17 nt, Artificial Sequence
  Description of Artificial Sequence:  Enzymatic Nucleic Acid
cucgcugcucuuuuugu

SEQ ID NO: 1626 - RNA, 17 nt, Artificial Sequence
  Description of Artificial Sequence:  Enzymatic Nucleic Acid
cgcugcucuuuuuguuc

SEQ ID NO: 1627 - RNA, 17 nt, Artificial Sequence
  Description of Artificial Sequence:  Enzymatic Nucleic Acid
uuuuguucccuucuguc

SEQ ID NO: 1628 - RNA, 17 nt, Artificial Sequence
  Description of Artificial Sequence:  Enzymatic Nucleic Acid
uuuguucccuucugucu

SEQ ID NO: 1629 - RNA, 17 nt, Artificial Sequence
  Description of Artificial Sequence:  Enzymatic Nucleic Acid
uuguucccuucugucug

SEQ ID NO: 1630 - RNA, 17 nt, Artificial Sequence
  Description of Artificial Sequence:  Enzymatic Nucleic Acid
uucccuucugucugcuc

SEQ ID NO: 1631 - RNA, 17 nt, Artificial Sequence
  Description of Artificial Sequence:  Enzymatic Nucleic Acid
cuucugucugcucgaac

SEQ ID NO: 1632 - RNA, 17 nt, Artificial Sequence
  Description of Artificial Sequence:  Enzymatic Nucleic Acid
cugucugcucgaaccac

SEQ ID NO: 1633 - RNA, 17 nt, Artificial Sequence
  Description of Artificial Sequence:  Enzymatic Nucleic Acid
gcucgaaccacuugccu

SEQ ID NO: 1634 - RNA, 17 nt, Artificial Sequence
  Description of Artificial Sequence:  Enzymatic Nucleic Acid
cucgaaccacuugccuc

SEQ ID NO: 1635 - RNA, 17 nt, Artificial Sequence
  Description of Artificial Sequence:  Enzymatic Nucleic Acid
cgaaccacuugccucgg

SEQ ID NO: 1636 - RNA, 17 nt, Artificial Sequence
  Description of Artificial Sequence:  Enzymatic Nucleic Acid
ccacuugccucgggcua

SEQ ID NO: 1637 - RNA, 17 nt, Artificial Sequence
  Description of Artificial Sequence:  Enzymatic Nucleic Acid
cacuugccucgggcuaa

SEQ ID NO: 1638 - RNA, 17 nt, Artificial Sequence
  Description of Artificial Sequence:  Enzymatic Nucleic Acid
ccucgggcuaaucccuc

SEQ ID NO: 1639 - RNA, 17 nt, Artificial Sequence
  Description of Artificial Sequence:  Enzymatic Nucleic Acid
ggcuaaucccucccucu

SEQ ID NO: 1640 - RNA, 17 nt, Artificial Sequence
  Description of Artificial Sequence:  Enzymatic Nucleic Acid
gcuaaucccucccucuu

SEQ ID NO: 1641 - RNA, 17 nt, Artificial Sequence
  Description of Artificial Sequence:  Enzymatic Nucleic Acid
cuaaucccucccucuuc

SEQ ID NO: 1642 - RNA, 17 nt, Artificial Sequence
  Description of Artificial Sequence:  Enzymatic Nucleic Acid
aaucccucccucuuccu

SEQ ID NO: 1643 - RNA, 17 nt, Artificial Sequence
  Description of Artificial Sequence:  Enzymatic Nucleic Acid
aucccucccucuuccuc

SEQ ID NO: 1644 - RNA, 17 nt, Artificial Sequence
  Description of Artificial Sequence:  Enzymatic Nucleic Acid
ucccucccucuuccucc

SEQ ID NO: 1645 - RNA, 17 nt, Artificial Sequence
  Description of Artificial Sequence:  Enzymatic Nucleic Acid
ccucccucuuccuccac

SEQ ID NO: 1646 - RNA, 17 nt, Artificial Sequence
  Description of Artificial Sequence:  Enzymatic Nucleic Acid
cccucuuccuccacccg

SEQ ID NO: 1647 - RNA, 17 nt, Artificial Sequence
  Description of Artificial Sequence:  Enzymatic Nucleic Acid
ccucuuccuccacccgg

SEQ ID NO: 1648 - RNA, 17 nt, Artificial Sequence
  Description of Artificial Sequence:  Enzymatic Nucleic Acid
ucuuccuccacccggca

SEQ ID NO: 1649 - RNA, 17 nt, Artificial Sequence
  Description of Artificial Sequence:  Enzymatic Nucleic Acid
cuuccuccacccggcac

SEQ ID NO: 1650 - RNA, 17 nt, Artificial Sequence
  Description of Artificial Sequence:  Enzymatic Nucleic Acid
uccuccacccggcacug

SEQ ID NO: 1651 - RNA, 17 nt, Artificial Sequence
  Description of Artificial Sequence:  Enzymatic Nucleic Acid
ccuccacccggcacugg

SEQ ID NO: 1652 - RNA, 17 nt, Artificial Sequence
  Description of Artificial Sequence:  Enzymatic Nucleic Acid
cacccggcacuggggaa

SEQ ID NO: 1653 - RNA, 17 nt, Artificial Sequence
  Description of Artificial Sequence:  Enzymatic Nucleic Acid
cccggcacuggggaagu

SEQ ID NO: 1654 - RNA, 17 nt, Artificial Sequence
  Description of Artificial Sequence:  Enzymatic Nucleic Acid
gggaagucaagaauggg

SEQ ID NO: 1655 - RNA, 17 nt, Artificial Sequence
  Description of Artificial Sequence:  Enzymatic Nucleic Acid
aauggggccuggggcuc

SEQ ID NO: 1656 - RNA, 17 nt, Artificial Sequence
  Description of Artificial Sequence:  Enzymatic Nucleic Acid
auggggccuggggcucu

SEQ ID NO: 1657 - RNA, 17 nt, Artificial Sequence
  Description of Artificial Sequence:  Enzymatic Nucleic Acid
ccuggggcucucaggga

SEQ ID NO: 1658 - RNA, 17 nt, Artificial Sequence
  Description of Artificial Sequence:  Enzymatic Nucleic Acid
uggggcucucagggaga

SEQ ID NO: 1659 - RNA, 17 nt, Artificial Sequence
  Description of Artificial Sequence:  Enzymatic Nucleic Acid
gggcucucagggagaac

SEQ ID NO: 1660 - RNA, 17 nt, Artificial Sequence
  Description of Artificial Sequence:  Enzymatic Nucleic Acid
gggagaacugcuucccc

SEQ ID NO: 1661 - RNA, 17 nt, Artificial Sequence
  Description of Artificial Sequence:  Enzymatic Nucleic Acid
agaacugcuuccccugg

SEQ ID NO: 1662 - RNA, 17 nt, Artificial Sequence
  Description of Artificial Sequence:  Enzymatic Nucleic Acid
acugcuuccccuggcag

SEQ ID NO: 1663 - RNA, 17 nt, Artificial Sequence
  Description of Artificial Sequence:  Enzymatic Nucleic Acid
cugcuuccccuggcaga

SEQ ID NO: 1664 - RNA, 17 nt, Artificial Sequence
  Description of Artificial Sequence:  Enzymatic Nucleic Acid
ugcuuccccuggcagag

SEQ ID NO: 1665 - RNA, 17 nt, Artificial Sequence
  Description of Artificial Sequence:  Enzymatic Nucleic Acid
gcuuccccuggcagagc

SEQ ID NO: 1666 - RNA, 17 nt, Artificial Sequence
  Description of Artificial Sequence:  Enzymatic Nucleic Acid
ccccuggcagagcuggg

SEQ ID NO: 1667 - RNA, 17 nt, Artificial Sequence
  Description of Artificial Sequence:  Enzymatic Nucleic Acid
ggcagagcuggguggca

SEQ ID NO: 1668 - RNA, 17 nt, Artificial Sequence
  Description of Artificial Sequence:  Enzymatic Nucleic Acid
uggguggcagcucuucc

SEQ ID NO: 1669 - RNA, 17 nt, Artificial Sequence
  Description of Artificial Sequence:  Enzymatic Nucleic Acid
guggcagcucuuccucc

SEQ ID NO: 1670 - RNA, 17 nt, Artificial Sequence
  Description of Artificial Sequence:  Enzymatic Nucleic Acid
ggcagcucuuccuccca

SEQ ID NO: 1671 - RNA, 17 nt, Artificial Sequence
  Description of Artificial Sequence:  Enzymatic Nucleic Acid
agcucuuccucccaccg

SEQ ID NO: 1672 - RNA, 17 nt, Artificial Sequence
  Description of Artificial Sequence:  Enzymatic Nucleic Acid
gcucuuccucccaccgg

SEQ ID NO: 1673 - RNA, 17 nt, Artificial Sequence
  Description of Artificial Sequence:  Enzymatic Nucleic Acid
ucuuccucccaccggac

SEQ ID NO: 1674 - RNA, 17 nt, Artificial Sequence
  Description of Artificial Sequence:  Enzymatic Nucleic Acid
cuuccucccaccggaca

SEQ ID NO: 1675 - RNA, 17 nt, Artificial Sequence
  Description of Artificial Sequence:  Enzymatic Nucleic Acid
uuccucccaccggacac

SEQ ID NO: 1676 - RNA, 17 nt, Artificial Sequence
  Description of Artificial Sequence:  Enzymatic Nucleic Acid
ccucccaccggacaccg

SEQ ID NO: 1677 - RNA, 17 nt, Artificial Sequence
  Description of Artificial Sequence:  Enzymatic Nucleic Acid
caccggacaccgacccg

SEQ ID NO: 1678 - RNA, 17 nt, Artificial Sequence
  Description of Artificial Sequence:  Enzymatic Nucleic Acid
ccggacaccgacccgcc

SEQ ID NO: 1679 - RNA, 17 nt, Artificial Sequence
  Description of Artificial Sequence:  Enzymatic Nucleic Acid
acaccgacccgcccgcc

SEQ ID NO: 1680 - RNA, 17 nt, Artificial Sequence
  Description of Artificial Sequence:  Enzymatic Nucleic Acid
caccgacccgcccgccg

SEQ ID NO: 1681 - RNA, 17 nt, Artificial Sequence
  Description of Artificial Sequence:  Enzymatic Nucleic Acid
cgacccgcccgccgcug

SEQ ID NO: 1682 - RNA, 17 nt, Artificial Sequence
  Description of Artificial Sequence:  Enzymatic Nucleic Acid
gacccgcccgccgcugu

SEQ ID NO: 1683 - RNA, 17 nt, Artificial Sequence
  Description of Artificial Sequence:  Enzymatic Nucleic Acid
ccgcccgccgcugugcc

SEQ ID NO: 1684 - RNA, 17 nt, Artificial Sequence
  Description of Artificial Sequence:  Enzymatic Nucleic Acid
cccgccgcugugcccug

SEQ ID NO: 1685 - RNA, 17 nt, Artificial Sequence
  Description of Artificial Sequence:  Enzymatic Nucleic Acid
cgcugugcccugggagu

SEQ ID NO: 1686 - RNA, 17 nt, Artificial Sequence
  Description of Artificial Sequence:  Enzymatic Nucleic Acid
gcugugcccugggagug

SEQ ID NO: 1687 - RNA, 17 nt, Artificial Sequence
  Description of Artificial Sequence:  Enzymatic Nucleic Acid
cugugcccugggagugc

SEQ ID NO: 1688 - RNA, 17 nt, Artificial Sequence
  Description of Artificial Sequence:  Enzymatic Nucleic Acid
gggagugcugcccucuu

SEQ ID NO: 1689 - RNA, 17 nt, Artificial Sequence
  Description of Artificial Sequence:  Enzymatic Nucleic Acid
agugcugcccucuuacc

SEQ ID NO: 1690 - RNA, 17 nt, Artificial Sequence
  Description of Artificial Sequence:  Enzymatic Nucleic Acid
gugcugcccucuuacca

SEQ ID NO: 1691 - RNA, 17 nt, Artificial Sequence
  Description of Artificial Sequence:  Enzymatic Nucleic Acid
ugcugcccucuuaccau

SEQ ID NO: 1692 - RNA, 17 nt, Artificial Sequence
  Description of Artificial Sequence:  Enzymatic Nucleic Acid
cugcccucuuaccaugc

SEQ ID NO: 1693 - RNA, 17 nt, Artificial Sequence
  Description of Artificial Sequence:  Enzymatic Nucleic Acid
ccucuuaccaugcacac

SEQ ID NO: 1694 - RNA, 17 nt, Artificial Sequence
  Description of Artificial Sequence:  Enzymatic Nucleic Acid
cucuuaccaugcacacg

SEQ ID NO: 1695 - RNA, 17 nt, Artificial Sequence
  Description of Artificial Sequence:  Enzymatic Nucleic Acid
uaccaugcacacgggug

SEQ ID NO: 1696 - RNA, 17 nt, Artificial Sequence
  Description of Artificial Sequence:  Enzymatic Nucleic Acid
ccaugcacacgggugcu

SEQ ID NO: 1697 - RNA, 17 nt, Artificial Sequence
  Description of Artificial Sequence:  Enzymatic Nucleic Acid
acgggugcucuccuuuu

SEQ ID NO: 1698 - RNA, 17 nt, Artificial Sequence
  Description of Artificial Sequence:  Enzymatic Nucleic Acid
gggugcucuccuuuugg

SEQ ID NO: 1699 - RNA, 17 nt, Artificial Sequence
  Description of Artificial Sequence:  Enzymatic Nucleic Acid
gugcucuccuuuugggc

SEQ ID NO: 1700 - RNA, 17 nt, Artificial Sequence
  Description of Artificial Sequence:  Enzymatic Nucleic Acid
ugcucuccuuuugggcu

SEQ ID NO: 1701 - RNA, 17 nt, Artificial Sequence
  Description of Artificial Sequence:  Enzymatic Nucleic Acid
uuuugggcugcaugcua

SEQ ID NO: 1702 - RNA, 17 nt, Artificial Sequence
  Description of Artificial Sequence:  Enzymatic Nucleic Acid
ugggcugcaugcuauuc

SEQ ID NO: 1703 - RNA, 17 nt, Artificial Sequence
  Description of Artificial Sequence:  Enzymatic Nucleic Acid
cugcaugcuauuccauu

SEQ ID NO: 1704 - RNA, 17 nt, Artificial Sequence
  Description of Artificial Sequence:  Enzymatic Nucleic Acid
ugcuauuccauuuugca

SEQ ID NO: 1705 - RNA, 17 nt, Artificial Sequence
  Description of Artificial Sequence:  Enzymatic Nucleic Acid
gcuauuccauuuugcag

SEQ ID NO: 1706 - RNA, 17 nt, Artificial Sequence
  Description of Artificial Sequence:  Enzymatic Nucleic Acid
cauuuugcagccagacc

SEQ ID NO: 1707 - RNA, 17 nt, Artificial Sequence
  Description of Artificial Sequence:  Enzymatic Nucleic Acid
uuugcagccagaccgau

SEQ ID NO: 1708 - RNA, 17 nt, Artificial Sequence
  Description of Artificial Sequence:  Enzymatic Nucleic Acid
uugcagccagaccgaug

SEQ ID NO: 1709 - RNA, 17 nt, Artificial Sequence
  Description of Artificial Sequence:  Enzymatic Nucleic Acid
agccagaccgaugugua

SEQ ID NO: 1710 - RNA, 17 nt, Artificial Sequence
  Description of Artificial Sequence:  Enzymatic Nucleic Acid
uauuuaaccagucacua

SEQ ID NO: 1711 - RNA, 17 nt, Artificial Sequence
  Description of Artificial Sequence:  Enzymatic Nucleic Acid
auuuaaccagucacuau

SEQ ID NO: 1712 - RNA, 17 nt, Artificial Sequence
  Description of Artificial Sequence:  Enzymatic Nucleic Acid
aaccagucacuauugau

SEQ ID NO: 1713 - RNA, 17 nt, Artificial Sequence
  Description of Artificial Sequence:  Enzymatic Nucleic Acid
ccagucacuauugaugg

SEQ ID NO: 1714 - RNA, 17 nt, Artificial Sequence
  Description of Artificial Sequence:  Enzymatic Nucleic Acid
ugauggacauuuggguu

SEQ ID NO: 1715 - RNA, 17 nt, Artificial Sequence
  Description of Artificial Sequence:  Enzymatic Nucleic Acid
guuguuucccaucuuuu

SEQ ID NO: 1716 - RNA, 17 nt, Artificial Sequence
  Description of Artificial Sequence:  Enzymatic Nucleic Acid
uuguuucccaucuuuuu

SEQ ID NO: 1717 - RNA, 17 nt, Artificial Sequence
  Description of Artificial Sequence:  Enzymatic Nucleic Acid
uguuucccaucuuuuug

SEQ ID NO: 1718 - RNA, 17 nt, Artificial Sequence
  Description of Artificial Sequence:  Enzymatic Nucleic Acid
uucccaucuuuuuguua

SEQ ID NO: 1719 - RNA, 17 nt, Artificial Sequence
  Description of Artificial Sequence:  Enzymatic Nucleic Acid
uuuguuaccauaaauaa

SEQ ID NO: 1720 - RNA, 17 nt, Artificial Sequence
  Description of Artificial Sequence:  Enzymatic Nucleic Acid
uuguuaccauaaauaau

SEQ ID NO: 1721 - RNA, 17 nt, Artificial Sequence
  Description of Artificial Sequence:  Enzymatic Nucleic Acid
auaauggcauaguaaaa

SEQ ID NO: 1722 - RNA, 17 nt, Artificial Sequence
  Description of Artificial Sequence:  Enzymatic Nucleic Acid
cgagcauggcccuugug

SEQ ID NO: 1723 - RNA, 17 nt, Artificial Sequence
  Description of Artificial Sequence:  Enzymatic Nucleic Acid
uggcccuugugauccag

SEQ ID NO: 1724 - RNA, 17 nt, Artificial Sequence
  Description of Artificial Sequence:  Enzymatic Nucleic Acid
ugauccagguggggaaa

SEQ ID NO: 1725 - RNA, 17 nt, Artificial Sequence
  Description of Artificial Sequence:  Enzymatic Nucleic Acid
aaacuaaggcccagaga

SEQ ID NO: 1726 - RNA, 17 nt, Artificial Sequence
  Description of Artificial Sequence:  Enzymatic Nucleic Acid
ccagagaagugaggacc

SEQ ID NO: 1727 - RNA, 17 nt, Artificial Sequence
  Description of Artificial Sequence:  Enzymatic Nucleic Acid
aggaccccgcagacuau

SEQ ID NO: 1728 - RNA, 17 nt, Artificial Sequence
  Description of Artificial Sequence:  Enzymatic Nucleic Acid
caaucccagucucuucc

SEQ ID NO: 1729 - RNA, 17 nt, Artificial Sequence
  Description of Artificial Sequence:  Enzymatic Nucleic Acid
cacucccugugaagcuc

SEQ ID NO: 1730 - RNA, 17 nt, Artificial Sequence
  Description of Artificial Sequence:  Enzymatic Nucleic Acid
ccugugaagcucuccag

SEQ ID NO: 1731 - RNA, 17 nt, Artificial Sequence
  Description of Artificial Sequence:  Enzymatic Nucleic Acid
gcucuccagcaucaucg

SEQ ID NO: 1732 - RNA, 17 nt, Artificial Sequence
  Description of Artificial Sequence:  Enzymatic Nucleic Acid
ucaucgaggucccauca

SEQ ID NO: 1733 - RNA, 17 nt, Artificial Sequence
  Description of Artificial Sequence:  Enzymatic Nucleic Acid
ucccaucagcccuugcc

SEQ ID NO: 1734 - RNA, 17 nt, Artificial Sequence
  Description of Artificial Sequence:  Enzymatic Nucleic Acid
cagcccuugcccuguug

SEQ ID NO: 1735 - RNA, 17 nt, Artificial Sequence
  Description of Artificial Sequence:  Enzymatic Nucleic Acid
cuugcccuguuggauga

SEQ ID NO: 1736 - RNA, 17 nt, Artificial Sequence
  Description of Artificial Sequence:  Enzymatic Nucleic Acid
augaauaggcaccucug

SEQ ID NO: 1737 - RNA, 17 nt, Artificial Sequence
  Description of Artificial Sequence:  Enzymatic Nucleic Acid
cuggaagagccaacugu

SEQ ID NO: 1738 - RNA, 17 nt, Artificial Sequence
  Description of Artificial Sequence:  Enzymatic Nucleic Acid
agccaacugugugagau

SEQ ID NO: 1739 - RNA, 17 nt, Artificial Sequence
  Description of Artificial Sequence:  Enzymatic Nucleic Acid
ccaacugugugagaugg

SEQ ID NO: 1740 - RNA, 17 nt, Artificial Sequence
  Description of Artificial Sequence:  Enzymatic Nucleic Acid
gugagauggugcagccc

SEQ ID NO: 1741 - RNA, 17 nt, Artificial Sequence
  Description of Artificial Sequence:  Enzymatic Nucleic Acid
gagauggugcagcccag

SEQ ID NO: 1742 - RNA, 17 nt, Artificial Sequence
  Description of Artificial Sequence:  Enzymatic Nucleic Acid
auggugcagcccagugg

SEQ ID NO: 1743 - RNA, 17 nt, Artificial Sequence
  Description of Artificial Sequence:  Enzymatic Nucleic Acid
gcagcccagugguggcc

SEQ ID NO: 1744 - RNA, 17 nt, Artificial Sequence
  Description of Artificial Sequence:  Enzymatic Nucleic Acid
gcccagugguggcccgg

SEQ ID NO: 1745 - RNA, 17 nt, Artificial Sequence
  Description of Artificial Sequence:  Enzymatic Nucleic Acid
cagugguggcccggcag

SEQ ID NO: 1746 - RNA, 17 nt, Artificial Sequence
  Description of Artificial Sequence:  Enzymatic Nucleic Acid
guggcccggcagcagau

SEQ ID NO: 1747 - RNA, 17 nt, Artificial Sequence
  Description of Artificial Sequence:  Enzymatic Nucleic Acid
gcccggcagcagaucag

SEQ ID NO: 1748 - RNA, 17 nt, Artificial Sequence
  Description of Artificial Sequence:  Enzymatic Nucleic Acid
aucaggacguacugggc

SEQ ID NO: 1749 - RNA, 17 nt, Artificial Sequence
  Description of Artificial Sequence:  Enzymatic Nucleic Acid
cguacugggcgaagagu

SEQ ID NO: 1750 - RNA, 17 nt, Artificial Sequence
  Description of Artificial Sequence:  Enzymatic Nucleic Acid
ggcgaagagucuccucu

SEQ ID NO: 1751 - RNA, 17 nt, Artificial Sequence
  Description of Artificial Sequence:  Enzymatic Nucleic Acid
cuggggaagccagccau

SEQ ID NO: 1752 - RNA, 17 nt, Artificial Sequence
  Description of Artificial Sequence:  Enzymatic Nucleic Acid
ggaagccagccaugcug

SEQ ID NO: 1753 - RNA, 17 nt, Artificial Sequence
  Description of Artificial Sequence:  Enzymatic Nucleic Acid
ccagccaugcugcaccu

SEQ ID NO: 1754 - RNA, 17 nt, Artificial Sequence
  Description of Artificial Sequence:  Enzymatic Nucleic Acid
gccaugcugcaccugcc

SEQ ID NO: 1755 - RNA, 17 nt, Artificial Sequence
  Description of Artificial Sequence:  Enzymatic Nucleic Acid
cugcaccugccuucaga

SEQ ID NO: 1756 - RNA, 17 nt, Artificial Sequence
  Description of Artificial Sequence:  Enzymatic Nucleic Acid
agaacagggcgcuccug

SEQ ID NO: 1757 - RNA, 17 nt, Artificial Sequence
  Description of Artificial Sequence:  Enzymatic Nucleic Acid
aacagggcgcuccugag

SEQ ID NO: 1758 - RNA, 17 nt, Artificial Sequence
  Description of Artificial Sequence:  Enzymatic Nucleic Acid
acccuccagcgcugccu

SEQ ID NO: 1759 - RNA, 17 nt, Artificial Sequence
  Description of Artificial Sequence:  Enzymatic Nucleic Acid
ccuccagcgcugccugg

SEQ ID NO: 1760 - RNA, 17 nt, Artificial Sequence
  Description of Artificial Sequence:  Enzymatic Nucleic Acid
ccagcgcugccuggagg

SEQ ID NO: 1761 - RNA, 17 nt, Artificial Sequence
  Description of Artificial Sequence:  Enzymatic Nucleic Acid
aaucaagagcuccgaga

SEQ ID NO: 1762 - RNA, 17 nt, Artificial Sequence
  Description of Artificial Sequence:  Enzymatic Nucleic Acid
uccgagaugccauccgg

SEQ ID NO: 1763 - RNA, 17 nt, Artificial Sequence
  Description of Artificial Sequence:  Enzymatic Nucleic Acid
gccauccggcagagcaa

SEQ ID NO: 1764 - RNA, 17 nt, Artificial Sequence
  Description of Artificial Sequence:  Enzymatic Nucleic Acid
ccggcagagcaaccaga

SEQ ID NO: 1765 - RNA, 17 nt, Artificial Sequence
  Description of Artificial Sequence:  Enzymatic Nucleic Acid
cagauucugcgggagcg

SEQ ID NO: 1766 - RNA, 17 nt, Artificial Sequence
  Description of Artificial Sequence:  Enzymatic Nucleic Acid
cugcgggagcgcugcga

SEQ ID NO: 1767 - RNA, 17 nt, Artificial Sequence
  Description of Artificial Sequence:  Enzymatic Nucleic Acid
gcgggagcgcugcgagg

SEQ ID NO: 1768 - RNA, 17 nt, Artificial Sequence
  Description of Artificial Sequence:  Enzymatic Nucleic Acid
ggagcgcugcgaggagc

SEQ ID NO: 1769 - RNA, 17 nt, Artificial Sequence
  Description of Artificial Sequence:  Enzymatic Nucleic Acid
ugcgaggagcuucugca

SEQ ID NO: 1770 - RNA, 17 nt, Artificial Sequence
  Description of Artificial Sequence:  Enzymatic Nucleic Acid
gagcuucugcauuucca

SEQ ID NO: 1771 - RNA, 17 nt, Artificial Sequence
  Description of Artificial Sequence:  Enzymatic Nucleic Acid
auuuccaagccagccag

SEQ ID NO: 1772 - RNA, 17 nt, Artificial Sequence
  Description of Artificial Sequence:  Enzymatic Nucleic Acid
ccaagccagccagaggg

SEQ ID NO: 1773 - RNA, 17 nt, Artificial Sequence
  Description of Artificial Sequence:  Enzymatic Nucleic Acid
gagaaggaguuccucau

SEQ ID NO: 1774 - RNA, 17 nt, Artificial Sequence
  Description of Artificial Sequence:  Enzymatic Nucleic Acid
uuccucaugugcaaguu

SEQ ID NO: 1775 - RNA, 17 nt, Artificial Sequence
  Description of Artificial Sequence:  Enzymatic Nucleic Acid
ccucaugugcaaguucc

SEQ ID NO: 1776 - RNA, 17 nt, Artificial Sequence
  Description of Artificial Sequence:  Enzymatic Nucleic Acid
augugcaaguuccagga

SEQ ID NO: 1777 - RNA, 17 nt, Artificial Sequence
  Description of Artificial Sequence:  Enzymatic Nucleic Acid
uccaggaggccaggaaa

SEQ ID NO: 1778 - RNA, 17 nt, Artificial Sequence
  Description of Artificial Sequence:  Enzymatic Nucleic Acid
ggaaacugguggagaga

SEQ ID NO: 1779 - RNA, 17 nt, Artificial Sequence
  Description of Artificial Sequence:  Enzymatic Nucleic Acid
gagacucggccuggaga

SEQ ID NO: 1780 - RNA, 17 nt, Artificial Sequence
  Description of Artificial Sequence:  Enzymatic Nucleic Acid
cuggagaagcucgaucu

SEQ ID NO: 1781 - RNA, 17 nt, Artificial Sequence
  Description of Artificial Sequence:  Enzymatic Nucleic Acid
cugaagaggcagaagga

SEQ ID NO: 1782 - RNA, 17 nt, Artificial Sequence
  Description of Artificial Sequence:  Enzymatic Nucleic Acid
cagaaggagcaggcucu

SEQ ID NO: 1783 - RNA, 17 nt, Artificial Sequence
  Description of Artificial Sequence:  Enzymatic Nucleic Acid
aggagcaggcucugcgg

SEQ ID NO: 1784 - RNA, 17 nt, Artificial Sequence
  Description of Artificial Sequence:  Enzymatic Nucleic Acid
caggcucugcgggaggu

SEQ ID NO: 1785 - RNA, 17 nt, Artificial Sequence
  Description of Artificial Sequence:  Enzymatic Nucleic Acid
ugcgggagguggagcac

SEQ ID NO: 1786 - RNA, 17 nt, Artificial Sequence
  Description of Artificial Sequence:  Enzymatic Nucleic Acid
gagguggagcaccugaa

SEQ ID NO: 1787 - RNA, 17 nt, Artificial Sequence
  Description of Artificial Sequence:  Enzymatic Nucleic Acid
gaagagaugccagcagc

SEQ ID NO: 1788 - RNA, 17 nt, Artificial Sequence
  Description of Artificial Sequence:  Enzymatic Nucleic Acid
agaugccagcagcagau

SEQ ID NO: 1789 - RNA, 17 nt, Artificial Sequence
  Description of Artificial Sequence:  Enzymatic Nucleic Acid
ugccagcagcagauggc

SEQ ID NO: 1790 - RNA, 17 nt, Artificial Sequence
  Description of Artificial Sequence:  Enzymatic Nucleic Acid
agcagauggcugaggac

SEQ ID NO: 1791 - RNA, 17 nt, Artificial Sequence
  Description of Artificial Sequence:  Enzymatic Nucleic Acid
aggacaaggccucugug

SEQ ID NO: 1792 - RNA, 17 nt, Artificial Sequence
  Description of Artificial Sequence:  Enzymatic Nucleic Acid
aggccucugugaaagcc

SEQ ID NO: 1793 - RNA, 17 nt, Artificial Sequence
  Description of Artificial Sequence:  Enzymatic Nucleic Acid
cugugaaagcccaggug

SEQ ID NO: 1794 - RNA, 17 nt, Artificial Sequence
  Description of Artificial Sequence:  Enzymatic Nucleic Acid
aagcccaggugacgucc

SEQ ID NO: 1795 - RNA, 17 nt, Artificial Sequence
  Description of Artificial Sequence:  Enzymatic Nucleic Acid
caggugacguccuugcu

SEQ ID NO: 1796 - RNA, 17 nt, Artificial Sequence
  Description of Artificial Sequence:  Enzymatic Nucleic Acid
acguccuugcucgggga

SEQ ID NO: 1797 - RNA, 17 nt, Artificial Sequence
  Description of Artificial Sequence:  Enzymatic Nucleic Acid
cucggggagcugcagga

SEQ ID NO: 1798 - RNA, 17 nt, Artificial Sequence
  Description of Artificial Sequence:  Enzymatic Nucleic Acid
ggggagcugcaggagag

SEQ ID NO: 1799 - RNA, 17 nt, Artificial Sequence
  Description of Artificial Sequence:  Enzymatic Nucleic Acid
gcaggagagccagaguc

SEQ ID NO: 1800 - RNA, 17 nt, Artificial Sequence
  Description of Artificial Sequence:  Enzymatic Nucleic Acid
gagccagagucgcuugg

SEQ ID NO: 1801 - RNA, 17 nt, Artificial Sequence
  Description of Artificial Sequence:  Enzymatic Nucleic Acid
ccagagucgcuuggagg

SEQ ID NO: 1802 - RNA, 17 nt, Artificial Sequence
  Description of Artificial Sequence:  Enzymatic Nucleic Acid
gcuuggaggcugccacu

SEQ ID NO: 1803 - RNA, 17 nt, Artificial Sequence
  Description of Artificial Sequence:  Enzymatic Nucleic Acid
uggaggcugccacuaag

SEQ ID NO: 1804 - RNA, 17 nt, Artificial Sequence
  Description of Artificial Sequence:  Enzymatic Nucleic Acid
uaaggaaugccaggcuc

SEQ ID NO: 1805 - RNA, 17 nt, Artificial Sequence
  Description of Artificial Sequence:  Enzymatic Nucleic Acid
aaugccaggcucuggag

SEQ ID NO: 1806 - RNA, 17 nt, Artificial Sequence
  Description of Artificial Sequence:  Enzymatic Nucleic Acid
ucuggagggucgggccc

SEQ ID NO: 1807 - RNA, 17 nt, Artificial Sequence
  Description of Artificial Sequence:  Enzymatic Nucleic Acid
agggucgggcccgggcg

SEQ ID NO: 1808 - RNA, 17 nt, Artificial Sequence
  Description of Artificial Sequence:  Enzymatic Nucleic Acid
gggcccgggcggccagc

SEQ ID NO: 1809 - RNA, 17 nt, Artificial Sequence
  Description of Artificial Sequence:  Enzymatic Nucleic Acid
cccgggcggccagcgag

SEQ ID NO: 1810 - RNA, 17 nt, Artificial Sequence
  Description of Artificial Sequence:  Enzymatic Nucleic Acid
ggcggccagcgagcagg

SEQ ID NO: 1811 - RNA, 17 nt, Artificial Sequence
  Description of Artificial Sequence:  Enzymatic Nucleic Acid
gccagcgagcaggcgcg

SEQ ID NO: 1812 - RNA, 17 nt, Artificial Sequence
  Description of Artificial Sequence:  Enzymatic Nucleic Acid
gcgagcaggcgcggcag

SEQ ID NO: 1813 - RNA, 17 nt, Artificial Sequence
  Description of Artificial Sequence:  Enzymatic Nucleic Acid
gagcaggcgcggcagcu

SEQ ID NO: 1814 - RNA, 17 nt, Artificial Sequence
  Description of Artificial Sequence:  Enzymatic Nucleic Acid
caggcgcggcagcugga

SEQ ID NO: 1815 - RNA, 17 nt, Artificial Sequence
  Description of Artificial Sequence:  Enzymatic Nucleic Acid
gcgcggcagcuggagag

SEQ ID NO: 1816 - RNA, 17 nt, Artificial Sequence
  Description of Artificial Sequence:  Enzymatic Nucleic Acid
gcuggagagugagcgcg

SEQ ID NO: 1817 - RNA, 17 nt, Artificial Sequence
  Description of Artificial Sequence:  Enzymatic Nucleic Acid
gagagugagcgcgaggc

SEQ ID NO: 1818 - RNA, 17 nt, Artificial Sequence
  Description of Artificial Sequence:  Enzymatic Nucleic Acid
gagugagcgcgaggcgc

SEQ ID NO: 1819 - RNA, 17 nt, Artificial Sequence
  Description of Artificial Sequence:  Enzymatic Nucleic Acid
agcgcgaggcgcugcag

SEQ ID NO: 1820 - RNA, 17 nt, Artificial Sequence
  Description of Artificial Sequence:  Enzymatic Nucleic Acid
cgcgaggcgcugcagca

SEQ ID NO: 1821 - RNA, 17 nt, Artificial Sequence
  Description of Artificial Sequence:  Enzymatic Nucleic Acid
gaggcgcugcagcagca

SEQ ID NO: 1822 - RNA, 17 nt, Artificial Sequence
  Description of Artificial Sequence:  Enzymatic Nucleic Acid
gcgcugcagcagcagca

SEQ ID NO: 1823 - RNA, 17 nt, Artificial Sequence
  Description of Artificial Sequence:  Enzymatic Nucleic Acid
cugcagcagcagcacag

SEQ ID NO: 1824 - RNA, 17 nt, Artificial Sequence
  Description of Artificial Sequence:  Enzymatic Nucleic Acid
cagcagcagcacagcgu

SEQ ID NO: 1825 - RNA, 17 nt, Artificial Sequence
  Description of Artificial Sequence:  Enzymatic Nucleic Acid
gcagcacagcgugcagg

SEQ ID NO: 1826 - RNA, 17 nt, Artificial Sequence
  Description of Artificial Sequence:  Enzymatic Nucleic Acid
agcacagcgugcaggug

SEQ ID NO: 1827 - RNA, 17 nt, Artificial Sequence
  Description of Artificial Sequence:  Enzymatic Nucleic Acid
cacagcgugcaggugga

SEQ ID NO: 1828 - RNA, 17 nt, Artificial Sequence
  Description of Artificial Sequence:  Enzymatic Nucleic Acid
gcgugcagguggaccag

SEQ ID NO: 1829 - RNA, 17 nt, Artificial Sequence
  Description of Artificial Sequence:  Enzymatic Nucleic Acid
guggaccagcugcgcau

SEQ ID NO: 1830 - RNA, 17 nt, Artificial Sequence
  Description of Artificial Sequence:  Enzymatic Nucleic Acid
gaccagcugcgcaugca

SEQ ID NO: 1831 - RNA, 17 nt, Artificial Sequence
  Description of Artificial Sequence:  Enzymatic Nucleic Acid
ccagcugcgcaugcagg

SEQ ID NO: 1832 - RNA, 17 nt, Artificial Sequence
  Description of Artificial Sequence:  Enzymatic Nucleic Acid
cugcgcaugcagggcca

SEQ ID NO: 1833 - RNA, 17 nt, Artificial Sequence
  Description of Artificial Sequence:  Enzymatic Nucleic Acid
caugcagggccagagcg

SEQ ID NO: 1834 - RNA, 17 nt, Artificial Sequence
  Description of Artificial Sequence:  Enzymatic Nucleic Acid
gggccagagcguggagg

SEQ ID NO: 1835 - RNA, 17 nt, Artificial Sequence
  Description of Artificial Sequence:  Enzymatic Nucleic Acid
gccagagcguggaggcc

SEQ ID NO: 1836 - RNA, 17 nt, Artificial Sequence
  Description of Artificial Sequence:  Enzymatic Nucleic Acid
gcguggaggccgcgcuc

SEQ ID NO: 1837 - RNA, 17 nt, Artificial Sequence
  Description of Artificial Sequence:  Enzymatic Nucleic Acid
uggaggccgcgcuccgc

SEQ ID NO: 1838 - RNA, 17 nt, Artificial Sequence
  Description of Artificial Sequence:  Enzymatic Nucleic Acid
gaggccgcgcuccgcau

SEQ ID NO: 1839 - RNA, 17 nt, Artificial Sequence
  Description of Artificial Sequence:  Enzymatic Nucleic Acid
cgcgcuccgcauggagc

SEQ ID NO: 1840 - RNA, 17 nt, Artificial Sequence
  Description of Artificial Sequence:  Enzymatic Nucleic Acid
cgcauggagcgccaggc

SEQ ID NO: 1841 - RNA, 17 nt, Artificial Sequence
  Description of Artificial Sequence:  Enzymatic Nucleic Acid
cauggagcgccaggccg

SEQ ID NO: 1842 - RNA, 17 nt, Artificial Sequence
  Description of Artificial Sequence:  Enzymatic Nucleic Acid
agcgccaggccgccucg

SEQ ID NO: 1843 - RNA, 17 nt, Artificial Sequence
  Description of Artificial Sequence:  Enzymatic Nucleic Acid
gccaggccgccucggag

SEQ ID NO: 1844 - RNA, 17 nt, Artificial Sequence
  Description of Artificial Sequence:  Enzymatic Nucleic Acid
aagaggaagcuggccca

SEQ ID NO: 1845 - RNA, 17 nt, Artificial Sequence
  Description of Artificial Sequence:  Enzymatic Nucleic Acid
ggaagcuggcccaguug

SEQ ID NO: 1846 - RNA, 17 nt, Artificial Sequence
  Description of Artificial Sequence:  Enzymatic Nucleic Acid
cuggcccaguugcaggu

SEQ ID NO: 1847 - RNA, 17 nt, Artificial Sequence
  Description of Artificial Sequence:  Enzymatic Nucleic Acid
gcccaguugcagguggc

SEQ ID NO: 1848 - RNA, 17 nt, Artificial Sequence
  Description of Artificial Sequence:  Enzymatic Nucleic Acid
aguugcagguggccuau

SEQ ID NO: 1849 - RNA, 17 nt, Artificial Sequence
  Description of Artificial Sequence:  Enzymatic Nucleic Acid
ugcagguggccuaucac

SEQ ID NO: 1850 - RNA, 17 nt, Artificial Sequence
  Description of Artificial Sequence:  Enzymatic Nucleic Acid
uaucaccagcucuucca

SEQ ID NO: 1851 - RNA, 17 nt, Artificial Sequence
  Description of Artificial Sequence:  Enzymatic Nucleic Acid
caucaagagcagcgugg

SEQ ID NO: 1852 - RNA, 17 nt, Artificial Sequence
  Description of Artificial Sequence:  Enzymatic Nucleic Acid
caagagcagcguggugg

SEQ ID NO: 1853 - RNA, 17 nt, Artificial Sequence
  Description of Artificial Sequence:  Enzymatic Nucleic Acid
agagcagcguggugggc

SEQ ID NO: 1854 - RNA, 17 nt, Artificial Sequence
  Description of Artificial Sequence:  Enzymatic Nucleic Acid
gcagcguggugggcagu

SEQ ID NO: 1855 - RNA, 17 nt, Artificial Sequence
  Description of Artificial Sequence:  Enzymatic Nucleic Acid
cguggugggcagugagc

SEQ ID NO: 1856 - RNA, 17 nt, Artificial Sequence
  Description of Artificial Sequence:  Enzymatic Nucleic Acid
ggugggcagugagcgga

SEQ ID NO: 1857 - RNA, 17 nt, Artificial Sequence
  Description of Artificial Sequence:  Enzymatic Nucleic Acid
ggcagugagcggaagcg

SEQ ID NO: 1858 - RNA, 17 nt, Artificial Sequence
  Description of Artificial Sequence:  Enzymatic Nucleic Acid
gagcggaagcgaggaau

SEQ ID NO: 1859 - RNA, 17 nt, Artificial Sequence
  Description of Artificial Sequence:  Enzymatic Nucleic Acid
cgaggaaugcagcugga

SEQ ID NO: 1860 - RNA, 17 nt, Artificial Sequence
  Description of Artificial Sequence:  Enzymatic Nucleic Acid
ggaaugcagcuggaaga

SEQ ID NO: 1861 - RNA, 17 nt, Artificial Sequence
  Description of Artificial Sequence:  Enzymatic Nucleic Acid
cucaaacagcagcucca

SEQ ID NO: 1862 - RNA, 17 nt, Artificial Sequence
  Description of Artificial Sequence:  Enzymatic Nucleic Acid
aaacagcagcuccagca

SEQ ID NO: 1863 - RNA, 17 nt, Artificial Sequence
  Description of Artificial Sequence:  Enzymatic Nucleic Acid
cagcuccagcaggccga

SEQ ID NO: 1864 - RNA, 17 nt, Artificial Sequence
  Description of Artificial Sequence:  Enzymatic Nucleic Acid
uccagcaggccgaggag

SEQ ID NO: 1865 - RNA, 17 nt, Artificial Sequence
  Description of Artificial Sequence:  Enzymatic Nucleic Acid
ccgaggaggcccuggug

SEQ ID NO: 1866 - RNA, 17 nt, Artificial Sequence
  Description of Artificial Sequence:  Enzymatic Nucleic Acid
aggcccugguggccaaa

SEQ ID NO: 1867 - RNA, 17 nt, Artificial Sequence
  Description of Artificial Sequence:  Enzymatic Nucleic Acid
cccugguggccaaacag

SEQ ID NO: 1868 - RNA, 17 nt, Artificial Sequence
  Description of Artificial Sequence:  Enzymatic Nucleic Acid
aacaggaggugaucgau

SEQ ID NO: 1869 - RNA, 17 nt, Artificial Sequence
  Description of Artificial Sequence:  Enzymatic Nucleic Acid
aucgauaagcugaagga

SEQ ID NO: 1870 - RNA, 17 nt, Artificial Sequence
  Description of Artificial Sequence:  Enzymatic Nucleic Acid
aggaggaggccgagcag

SEQ ID NO: 1871 - RNA, 17 nt, Artificial Sequence
  Description of Artificial Sequence:  Enzymatic Nucleic Acid
gaggccgagcagcacaa

SEQ ID NO: 1872 - RNA, 17 nt, Artificial Sequence
  Description of Artificial Sequence:  Enzymatic Nucleic Acid
gccgagcagcacaagau

SEQ ID NO: 1873 - RNA, 17 nt, Artificial Sequence
  Description of Artificial Sequence:  Enzymatic Nucleic Acid
acaagauugugauggag

SEQ ID NO: 1874 - RNA, 17 nt, Artificial Sequence
  Description of Artificial Sequence:  Enzymatic Nucleic Acid
uggagaccguuccggug

SEQ ID NO: 1875 - RNA, 17 nt, Artificial Sequence
  Description of Artificial Sequence:  Enzymatic Nucleic Acid
ccguuccggugcugaag

SEQ ID NO: 1876 - RNA, 17 nt, Artificial Sequence
  Description of Artificial Sequence:  Enzymatic Nucleic Acid
guuccggugcugaaggc

SEQ ID NO: 1877 - RNA, 17 nt, Artificial Sequence
  Description of Artificial Sequence:  Enzymatic Nucleic Acid
ugcugaaggcccaggcg

SEQ ID NO: 1878 - RNA, 17 nt, Artificial Sequence
  Description of Artificial Sequence:  Enzymatic Nucleic Acid
aggcccaggcggauauc

SEQ ID NO: 1879 - RNA, 17 nt, Artificial Sequence
  Description of Artificial Sequence:  Enzymatic Nucleic Acid
ucuacaaggcggacuuc

SEQ ID NO: 1880 - RNA, 17 nt, Artificial Sequence
  Description of Artificial Sequence:  Enzymatic Nucleic Acid
acuuccaggcugagagg

SEQ ID NO: 1881 - RNA, 17 nt, Artificial Sequence
  Description of Artificial Sequence:  Enzymatic Nucleic Acid
gcugagaggcaggcccg

SEQ ID NO: 1882 - RNA, 17 nt, Artificial Sequence
  Description of Artificial Sequence:  Enzymatic Nucleic Acid
agaggcaggcccgggag

SEQ ID NO: 1883 - RNA, 17 nt, Artificial Sequence
  Description of Artificial Sequence:  Enzymatic Nucleic Acid
cgggagaagcuggccga

SEQ ID NO: 1884 - RNA, 17 nt, Artificial Sequence
  Description of Artificial Sequence:  Enzymatic Nucleic Acid
agaagcuggccgagaag

SEQ ID NO: 1885 - RNA, 17 nt, Artificial Sequence
  Description of Artificial Sequence:  Enzymatic Nucleic Acid
aagaaggagcuccugca

SEQ ID NO: 1886 - RNA, 17 nt, Artificial Sequence
  Description of Artificial Sequence:  Enzymatic Nucleic Acid
gagcuccugcaggagca

SEQ ID NO: 1887 - RNA, 17 nt, Artificial Sequence
  Description of Artificial Sequence:  Enzymatic Nucleic Acid
cugcaggagcagcugga

SEQ ID NO: 1888 - RNA, 17 nt, Artificial Sequence
  Description of Artificial Sequence:  Enzymatic Nucleic Acid
caggagcagcuggagca

SEQ ID NO: 1889 - RNA, 17 nt, Artificial Sequence
  Description of Artificial Sequence:  Enzymatic Nucleic Acid
cagcuggagcagcugca

SEQ ID NO: 1890 - RNA, 17 nt, Artificial Sequence
  Description of Artificial Sequence:  Enzymatic Nucleic Acid
cuggagcagcugcagag

SEQ ID NO: 1891 - RNA, 17 nt, Artificial Sequence
  Description of Artificial Sequence:  Enzymatic Nucleic Acid
gagcagcugcagaggga

SEQ ID NO: 1892 - RNA, 17 nt, Artificial Sequence
  Description of Artificial Sequence:  Enzymatic Nucleic Acid
cagagggaguacagcaa

SEQ ID NO: 1893 - RNA, 17 nt, Artificial Sequence
  Description of Artificial Sequence:  Enzymatic Nucleic Acid
ggaguacagcaaacuga

SEQ ID NO: 1894 - RNA, 17 nt, Artificial Sequence
  Description of Artificial Sequence:  Enzymatic Nucleic Acid
aacugaaggccagcugu

SEQ ID NO: 1895 - RNA, 17 nt, Artificial Sequence
  Description of Artificial Sequence:  Enzymatic Nucleic Acid
gaaggccagcugucagg

SEQ ID NO: 1896 - RNA, 17 nt, Artificial Sequence
  Description of Artificial Sequence:  Enzymatic Nucleic Acid
ggccagcugucaggagu

SEQ ID NO: 1897 - RNA, 17 nt, Artificial Sequence
  Description of Artificial Sequence:  Enzymatic Nucleic Acid
ugucaggagucggccag

SEQ ID NO: 1898 - RNA, 17 nt, Artificial Sequence
  Description of Artificial Sequence:  Enzymatic Nucleic Acid
aggagucggccaggauc

SEQ ID NO: 1899 - RNA, 17 nt, Artificial Sequence
  Description of Artificial Sequence:  Enzymatic Nucleic Acid
augaggaagcggcaugu

SEQ ID NO: 1900 - RNA, 17 nt, Artificial Sequence
  Description of Artificial Sequence:  Enzymatic Nucleic Acid
aggaagcggcaugucga

SEQ ID NO: 1901 - RNA, 17 nt, Artificial Sequence
  Description of Artificial Sequence:  Enzymatic Nucleic Acid
agcggcaugucgagguc

SEQ ID NO: 1902 - RNA, 17 nt, Artificial Sequence
  Description of Artificial Sequence:  Enzymatic Nucleic Acid
augucgaggucucccag

SEQ ID NO: 1903 - RNA, 17 nt, Artificial Sequence
  Description of Artificial Sequence:  Enzymatic Nucleic Acid
ucucccaggcccccuug

SEQ ID NO: 1904 - RNA, 17 nt, Artificial Sequence
  Description of Artificial Sequence:  Enzymatic Nucleic Acid
gcccccuugccccccgc

SEQ ID NO: 1905 - RNA, 17 nt, Artificial Sequence
  Description of Artificial Sequence:  Enzymatic Nucleic Acid
ugccccccgccccugcc

SEQ ID NO: 1906 - RNA, 17 nt, Artificial Sequence
  Description of Artificial Sequence:  Enzymatic Nucleic Acid
ccgccccugccuaccuc

SEQ ID NO: 1907 - RNA, 17 nt, Artificial Sequence
  Description of Artificial Sequence:  Enzymatic Nucleic Acid
cuccccuggcccugccc

SEQ ID NO: 1908 - RNA, 17 nt, Artificial Sequence
  Description of Artificial Sequence:  Enzymatic Nucleic Acid
cuggcccugcccagcca

SEQ ID NO: 1909 - RNA, 17 nt, Artificial Sequence
  Description of Artificial Sequence:  Enzymatic Nucleic Acid
ccugcccagccagagga

SEQ ID NO: 1910 - RNA, 17 nt, Artificial Sequence
  Description of Artificial Sequence:  Enzymatic Nucleic Acid
gaggaggagcccccccg

SEQ ID NO: 1911 - RNA, 17 nt, Artificial Sequence
  Description of Artificial Sequence:  Enzymatic Nucleic Acid
cccgaggagccaccuga

SEQ ID NO: 1912 - RNA, 17 nt, Artificial Sequence
  Description of Artificial Sequence:  Enzymatic Nucleic Acid
ugacuucugcuguccca

SEQ ID NO: 1913 - RNA, 17 nt, Artificial Sequence
  Description of Artificial Sequence:  Enzymatic Nucleic Acid
cuucugcugucccaagu

SEQ ID NO: 1914 - RNA, 17 nt, Artificial Sequence
  Description of Artificial Sequence:  Enzymatic Nucleic Acid
ugucccaagugccagua

SEQ ID NO: 1915 - RNA, 17 nt, Artificial Sequence
  Description of Artificial Sequence:  Enzymatic Nucleic Acid
ucccaagugccaguauc

SEQ ID NO: 1916 - RNA, 17 nt, Artificial Sequence
  Description of Artificial Sequence:  Enzymatic Nucleic Acid
aagugccaguaucaggc

SEQ ID NO: 1917 - RNA, 17 nt, Artificial Sequence
  Description of Artificial Sequence:  Enzymatic Nucleic Acid
aguaucaggccccugau

SEQ ID NO: 1918 - RNA, 17 nt, Artificial Sequence
  Description of Artificial Sequence:  Enzymatic Nucleic Acid
gacacccugcagauaca

SEQ ID NO: 1919 - RNA, 17 nt, Artificial Sequence
  Description of Artificial Sequence:  Enzymatic Nucleic Acid
agauacaugucauggag

SEQ ID NO: 1920 - RNA, 17 nt, Artificial Sequence
  Description of Artificial Sequence:  Enzymatic Nucleic Acid
gucauggagugcauuga

SEQ ID NO: 1921 - RNA, 17 nt, Artificial Sequence
  Description of Artificial Sequence:  Enzymatic Nucleic Acid
cauggagugcauugagu

SEQ ID NO: 1922 - RNA, 17 nt, Artificial Sequence
  Description of Artificial Sequence:  Enzymatic Nucleic Acid
ugcauugaguagggccg

SEQ ID NO: 1923 - RNA, 17 nt, Artificial Sequence
  Description of Artificial Sequence:  Enzymatic Nucleic Acid
ugaguagggccggccag

SEQ ID NO: 1924 - RNA, 17 nt, Artificial Sequence
  Description of Artificial Sequence:  Enzymatic Nucleic Acid
uagggccggccagugca

SEQ ID NO: 1925 - RNA, 17 nt, Artificial Sequence
  Description of Artificial Sequence:  Enzymatic Nucleic Acid
gccggccagugcaaggc

SEQ ID NO: 1926 - RNA, 17 nt, Artificial Sequence
  Description of Artificial Sequence:  Enzymatic Nucleic Acid
cggccagugcaaggcca

SEQ ID NO: 1927 - RNA, 17 nt, Artificial Sequence
  Description of Artificial Sequence:  Enzymatic Nucleic Acid
agugcaaggccacugcc

SEQ ID NO: 1928 - RNA, 17 nt, Artificial Sequence
  Description of Artificial Sequence:  Enzymatic Nucleic Acid
aggccacugccugcccg

SEQ ID NO: 1929 - RNA, 17 nt, Artificial Sequence
  Description of Artificial Sequence:  Enzymatic Nucleic Acid
cacugccugcccgagga

SEQ ID NO: 1930 - RNA, 17 nt, Artificial Sequence
  Description of Artificial Sequence:  Enzymatic Nucleic Acid
ccgaggacgugcccggg

SEQ ID NO: 1931 - RNA, 17 nt, Artificial Sequence
  Description of Artificial Sequence:  Enzymatic Nucleic Acid
gaggacgugcccgggac

SEQ ID NO: 1932 - RNA, 17 nt, Artificial Sequence
  Description of Artificial Sequence:  Enzymatic Nucleic Acid
ccgggaccgugcagucu

SEQ ID NO: 1933 - RNA, 17 nt, Artificial Sequence
  Description of Artificial Sequence:  Enzymatic Nucleic Acid
gggaccgugcagucugc

SEQ ID NO: 1934 - RNA, 17 nt, Artificial Sequence
  Description of Artificial Sequence:  Enzymatic Nucleic Acid
accgugcagucugcgcu

SEQ ID NO: 1935 - RNA, 17 nt, Artificial Sequence
  Description of Artificial Sequence:  Enzymatic Nucleic Acid
ugcagucugcgcuuucc

SEQ ID NO: 1936 - RNA, 17 nt, Artificial Sequence
  Description of Artificial Sequence:  Enzymatic Nucleic Acid
cagucugcgcuuuccuc

SEQ ID NO: 1937 - RNA, 17 nt, Artificial Sequence
  Description of Artificial Sequence:  Enzymatic Nucleic Acid
ccucucccgccugccua

SEQ ID NO: 1938 - RNA, 17 nt, Artificial Sequence
  Description of Artificial Sequence:  Enzymatic Nucleic Acid
ucccgccugccuagccc

SEQ ID NO: 1939 - RNA, 17 nt, Artificial Sequence
  Description of Artificial Sequence:  Enzymatic Nucleic Acid
ccugccuagcccaggau

SEQ ID NO: 1940 - RNA, 17 nt, Artificial Sequence
  Description of Artificial Sequence:  Enzymatic Nucleic Acid
gaugaagggcugggugg

SEQ ID NO: 1941 - RNA, 17 nt, Artificial Sequence
  Description of Artificial Sequence:  Enzymatic Nucleic Acid
agggcuggguggccaca

SEQ ID NO: 1942 - RNA, 17 nt, Artificial Sequence
  Description of Artificial Sequence:  Enzymatic Nucleic Acid
gcuggguggccacaacu

SEQ ID NO: 1943 - RNA, 17 nt, Artificial Sequence
  Description of Artificial Sequence:  Enzymatic Nucleic Acid
acugggaugccaccugg

SEQ ID NO: 1944 - RNA, 17 nt, Artificial Sequence
  Description of Artificial Sequence:  Enzymatic Nucleic Acid
caccuggagccccaccc

SEQ ID NO: 1945 - RNA, 17 nt, Artificial Sequence
  Description of Artificial Sequence:  Enzymatic Nucleic Acid
acccaggagcuggccgc

SEQ ID NO: 1946 - RNA, 17 nt, Artificial Sequence
  Description of Artificial Sequence:  Enzymatic Nucleic Acid
aggagcuggccgcggca

SEQ ID NO: 1947 - RNA, 17 nt, Artificial Sequence
  Description of Artificial Sequence:  Enzymatic Nucleic Acid
agcuggccgcggcaccu

SEQ ID NO: 1948 - RNA, 17 nt, Artificial Sequence
  Description of Artificial Sequence:  Enzymatic Nucleic Acid
uggccgcggcaccuuac

SEQ ID NO: 1949 - RNA, 17 nt, Artificial Sequence
  Description of Artificial Sequence:  Enzymatic Nucleic Acid
caccuuacgcuucagcu

SEQ ID NO: 1950 - RNA, 17 nt, Artificial Sequence
  Description of Artificial Sequence:  Enzymatic Nucleic Acid
acgcuucagcuguugau

SEQ ID NO: 1951 - RNA, 17 nt, Artificial Sequence
  Description of Artificial Sequence:  Enzymatic Nucleic Acid
cuucagcuguugauccg

SEQ ID NO: 1952 - RNA, 17 nt, Artificial Sequence
  Description of Artificial Sequence:  Enzymatic Nucleic Acid
guugauccgcugguccc

SEQ ID NO: 1953 - RNA, 17 nt, Artificial Sequence
  Description of Artificial Sequence:  Enzymatic Nucleic Acid
auccgcugguccccucu

SEQ ID NO: 1954 - RNA, 17 nt, Artificial Sequence
  Description of Artificial Sequence:  Enzymatic Nucleic Acid
cuuuugggguagaugcg

SEQ ID NO: 1955 - RNA, 17 nt, Artificial Sequence
  Description of Artificial Sequence:  Enzymatic Nucleic Acid
ggguagaugcggccccg

SEQ ID NO: 1956 - RNA, 17 nt, Artificial Sequence
  Description of Artificial Sequence:  Enzymatic Nucleic Acid
uagaugcggccccgauc

SEQ ID NO: 1957 - RNA, 17 nt, Artificial Sequence
  Description of Artificial Sequence:  Enzymatic Nucleic Acid
ccgaucaggccugacuc

SEQ ID NO: 1958 - RNA, 17 nt, Artificial Sequence
  Description of Artificial Sequence:  Enzymatic Nucleic Acid
ccugacucgcugcucuu

SEQ ID NO: 1959 - RNA, 17 nt, Artificial Sequence
  Description of Artificial Sequence:  Enzymatic Nucleic Acid
gacucgcugcucuuuuu

SEQ ID NO: 1960 - RNA, 17 nt, Artificial Sequence
  Description of Artificial Sequence:  Enzymatic Nucleic Acid
cucuuuuuguucccuuc

SEQ ID NO: 1961 - RNA, 17 nt, Artificial Sequence
  Description of Artificial Sequence:  Enzymatic Nucleic Acid
ucccuucugucugcucg

SEQ ID NO: 1962 - RNA, 17 nt, Artificial Sequence
  Description of Artificial Sequence:  Enzymatic Nucleic Acid
uucugucugcucgaacc

SEQ ID NO: 1963 - RNA, 17 nt, Artificial Sequence
  Description of Artificial Sequence:  Enzymatic Nucleic Acid
aaccacuugccucgggc

SEQ ID NO: 1964 - RNA, 17 nt, Artificial Sequence
  Description of Artificial Sequence:  Enzymatic Nucleic Acid
ugccucgggcuaauccc

SEQ ID NO: 1965 - RNA, 17 nt, Artificial Sequence
  Description of Artificial Sequence:  Enzymatic Nucleic Acid
uccacccggcacugggg

SEQ ID NO: 1966 - RNA, 17 nt, Artificial Sequence
  Description of Artificial Sequence:  Enzymatic Nucleic Acid
cuggggaagucaagaau

SEQ ID NO: 1967 - RNA, 17 nt, Artificial Sequence
  Description of Artificial Sequence:  Enzymatic Nucleic Acid
agaauggggccuggggc

SEQ ID NO: 1968 - RNA, 17 nt, Artificial Sequence
  Description of Artificial Sequence:  Enzymatic Nucleic Acid
ggccuggggcucucagg

SEQ ID NO: 1969 - RNA, 17 nt, Artificial Sequence
  Description of Artificial Sequence:  Enzymatic Nucleic Acid
ggagaacugcuuccccu

SEQ ID NO: 1970 - RNA, 17 nt, Artificial Sequence
  Description of Artificial Sequence:  Enzymatic Nucleic Acid
uuccccuggcagagcug

SEQ ID NO: 1971 - RNA, 17 nt, Artificial Sequence
  Description of Artificial Sequence:  Enzymatic Nucleic Acid
cuggcagagcugggugg

SEQ ID NO: 1972 - RNA, 17 nt, Artificial Sequence
  Description of Artificial Sequence:  Enzymatic Nucleic Acid
agagcuggguggcagcu

SEQ ID NO: 1973 - RNA, 17 nt, Artificial Sequence
  Description of Artificial Sequence:  Enzymatic Nucleic Acid
gcuggguggcagcucuu

SEQ ID NO: 1974 - RNA, 17 nt, Artificial Sequence
  Description of Artificial Sequence:  Enzymatic Nucleic Acid
ggguggcagcucuuccu

SEQ ID NO: 1975 - RNA, 17 nt, Artificial Sequence
  Description of Artificial Sequence:  Enzymatic Nucleic Acid
accgacccgcccgccgc

SEQ ID NO: 1976 - RNA, 17 nt, Artificial Sequence
  Description of Artificial Sequence:  Enzymatic Nucleic Acid
acccgcccgccgcugug

SEQ ID NO: 1977 - RNA, 17 nt, Artificial Sequence
  Description of Artificial Sequence:  Enzymatic Nucleic Acid
cgcccgccgcugugccc

SEQ ID NO: 1978 - RNA, 17 nt, Artificial Sequence
  Description of Artificial Sequence:  Enzymatic Nucleic Acid
ccgccgcugugcccugg

SEQ ID NO: 1979 - RNA, 17 nt, Artificial Sequence
  Description of Artificial Sequence:  Enzymatic Nucleic Acid
gccgcugugcccuggga

SEQ ID NO: 1980 - RNA, 17 nt, Artificial Sequence
  Description of Artificial Sequence:  Enzymatic Nucleic Acid
cccugggagugcugccc

SEQ ID NO: 1981 - RNA, 17 nt, Artificial Sequence
  Description of Artificial Sequence:  Enzymatic Nucleic Acid
cugggagugcugcccuc

SEQ ID NO: 1982 - RNA, 17 nt, Artificial Sequence
  Description of Artificial Sequence:  Enzymatic Nucleic Acid
ggagugcugcccucuua

SEQ ID NO: 1983 - RNA, 17 nt, Artificial Sequence
  Description of Artificial Sequence:  Enzymatic Nucleic Acid
cuuaccaugcacacggg

SEQ ID NO: 1984 - RNA, 17 nt, Artificial Sequence
  Description of Artificial Sequence:  Enzymatic Nucleic Acid
gcacacgggugcucucc

SEQ ID NO: 1985 - RNA, 17 nt, Artificial Sequence
  Description of Artificial Sequence:  Enzymatic Nucleic Acid
acacgggugcucuccuu

SEQ ID NO: 1986 - RNA, 17 nt, Artificial Sequence
  Description of Artificial Sequence:  Enzymatic Nucleic Acid
ccuuuugggcugcaugc

SEQ ID NO: 1987 - RNA, 17 nt, Artificial Sequence
  Description of Artificial Sequence:  Enzymatic Nucleic Acid
uuugggcugcaugcuau

SEQ ID NO: 1988 - RNA, 17 nt, Artificial Sequence
  Description of Artificial Sequence:  Enzymatic Nucleic Acid
ggcugcaugcuauucca

SEQ ID NO: 1989 - RNA, 17 nt, Artificial Sequence
  Description of Artificial Sequence:  Enzymatic Nucleic Acid
uccauuuugcagccaga

SEQ ID NO: 1990 - RNA, 17 nt, Artificial Sequence
  Description of Artificial Sequence:  Enzymatic Nucleic Acid
auuuugcagccagaccg

SEQ ID NO: 1991 - RNA, 17 nt, Artificial Sequence
  Description of Artificial Sequence:  Enzymatic Nucleic Acid
agaccgauguguauuua

SEQ ID NO: 1992 - RNA, 17 nt, Artificial Sequence
  Description of Artificial Sequence:  Enzymatic Nucleic Acid
accgauguguauuuaac

SEQ ID NO: 1993 - RNA, 17 nt, Artificial Sequence
  Description of Artificial Sequence:  Enzymatic Nucleic Acid
uuuaaccagucacuauu

SEQ ID NO: 1994 - RNA, 17 nt, Artificial Sequence
  Description of Artificial Sequence:  Enzymatic Nucleic Acid
acauuuggguuguuucc

SEQ ID NO: 1995 - RNA, 17 nt, Artificial Sequence
  Description of Artificial Sequence:  Enzymatic Nucleic Acid
uuuggguuguuucccau

SEQ ID NO: 1996 - RNA, 17 nt, Artificial Sequence
  Description of Artificial Sequence:  Enzymatic Nucleic Acid
aucuuuuuguuaccaua

SEQ ID NO: 1997 - RNA, 17 nt, Artificial Sequence
  Description of Artificial Sequence:  Enzymatic Nucleic Acid
aaauaauggcauaguaa

SEQ ID NO: 1998 - RNA, 17 nt, Artificial Sequence
  Description of Artificial Sequence:  Enzymatic Nucleic Acid
auggcauaguaaaaaaa

SEQ ID NO: 1999 - RNA, 17 nt, Artificial Sequence
  Description of Artificial Sequence:  Enzymatic Nucleic Acid
cccuugugauccaggug

SEQ ID NO: 2000 - RNA, 17 nt, Artificial Sequence
  Description of Artificial Sequence:  Enzymatic Nucleic Acid
guggggaaacuaaggcc

SEQ ID NO: 2001 - RNA, 17 nt, Artificial Sequence
  Description of Artificial Sequence:  Enzymatic Nucleic Acid
aagugaggaccccgcag

SEQ ID NO: 2002 - RNA, 17 nt, Artificial Sequence
  Description of Artificial Sequence:  Enzymatic Nucleic Acid
ccccgcagacuaucaau

SEQ ID NO: 2003 - RNA, 17 nt, Artificial Sequence
  Description of Artificial Sequence:  Enzymatic Nucleic Acid
gacuaucaaucccaguc

SEQ ID NO: 2004 - RNA, 17 nt, Artificial Sequence
  Description of Artificial Sequence:  Enzymatic Nucleic Acid
ccuguuggaugaauagg

SEQ ID NO: 2005 - RNA, 17 nt, Artificial Sequence
  Description of Artificial Sequence:  Enzymatic Nucleic Acid
uuggaugaauaggcacc

SEQ ID NO: 2006 - RNA, 17 nt, Artificial Sequence
  Description of Artificial Sequence:  Enzymatic Nucleic Acid
aagagccaacuguguga

SEQ ID NO: 2007 - RNA, 17 nt, Artificial Sequence
  Description of Artificial Sequence:  Enzymatic Nucleic Acid
ugugugagauggugcag

SEQ ID NO: 2008 - RNA, 17 nt, Artificial Sequence
  Description of Artificial Sequence:  Enzymatic Nucleic Acid
ggcagcagaucaggacg

SEQ ID NO: 2009 - RNA, 17 nt, Artificial Sequence
  Description of Artificial Sequence:  Enzymatic Nucleic Acid
agaucaggacguacugg

SEQ ID NO: 2010 - RNA, 17 nt, Artificial Sequence
  Description of Artificial Sequence:  Enzymatic Nucleic Acid
ccuucagaacagggcgc

SEQ ID NO: 2011 - RNA, 17 nt, Artificial Sequence
  Description of Artificial Sequence:  Enzymatic Nucleic Acid
cuccugagacccuccag

SEQ ID NO: 2012 - RNA, 17 nt, Artificial Sequence
  Description of Artificial Sequence:  Enzymatic Nucleic Acid
ggaggagaaucaagagc

SEQ ID NO: 2013 - RNA, 17 nt, Artificial Sequence
  Description of Artificial Sequence:  Enzymatic Nucleic Acid
gcuccgagaugccaucc

SEQ ID NO: 2014 - RNA, 17 nt, Artificial Sequence
  Description of Artificial Sequence:  Enzymatic Nucleic Acid
gcagagcaaccagauuc

SEQ ID NO: 2015 - RNA, 17 nt, Artificial Sequence
  Description of Artificial Sequence:  Enzymatic Nucleic Acid
gcaaccagauucugcgg

SEQ ID NO: 2016 - RNA, 17 nt, Artificial Sequence
  Description of Artificial Sequence:  Enzymatic Nucleic Acid
gccaggaaacuggugga

SEQ ID NO: 2017 - RNA, 17 nt, Artificial Sequence
  Description of Artificial Sequence:  Enzymatic Nucleic Acid
guggagagacucggccu

SEQ ID NO: 2018 - RNA, 17 nt, Artificial Sequence
  Description of Artificial Sequence:  Enzymatic Nucleic Acid
gaagcucgaucugaaga

SEQ ID NO: 2019 - RNA, 17 nt, Artificial Sequence
  Description of Artificial Sequence:  Enzymatic Nucleic Acid
cugaagagaugccagca

SEQ ID NO: 2020 - RNA, 17 nt, Artificial Sequence
  Description of Artificial Sequence:  Enzymatic Nucleic Acid
agcagcagauggcugag

SEQ ID NO: 2021 - RNA, 17 nt, Artificial Sequence
  Description of Artificial Sequence:  Enzymatic Nucleic Acid
ggcugaggacaaggccu

SEQ ID NO: 2022 - RNA, 17 nt, Artificial Sequence
  Description of Artificial Sequence:  Enzymatic Nucleic Acid
cccaggugacguccuug

SEQ ID NO: 2023 - RNA, 17 nt, Artificial Sequence
  Description of Artificial Sequence:  Enzymatic Nucleic Acid
acuaaggaaugccaggc

SEQ ID NO: 2024 - RNA, 17 nt, Artificial Sequence
  Description of Artificial Sequence:  Enzymatic Nucleic Acid
gcagguggaccagcugc

SEQ ID NO: 2025 - RNA, 17 nt, Artificial Sequence
  Description of Artificial Sequence:  Enzymatic Nucleic Acid
uuccaagaauacgacaa

SEQ ID NO: 2026 - RNA, 17 nt, Artificial Sequence
  Description of Artificial Sequence:  Enzymatic Nucleic Acid
agaauacgacaaccaca

SEQ ID NO: 2027 - RNA, 17 nt, Artificial Sequence
  Description of Artificial Sequence:  Enzymatic Nucleic Acid
auacgacaaccacauca

SEQ ID NO: 2028 - RNA, 17 nt, Artificial Sequence
  Description of Artificial Sequence:  Enzymatic Nucleic Acid
agcgaggaaugcagcug

SEQ ID NO: 2029 - RNA, 17 nt, Artificial Sequence
  Description of Artificial Sequence:  Enzymatic Nucleic Acid
gcuggaagaucucaaac

SEQ ID NO: 2030 - RNA, 17 nt, Artificial Sequence
  Description of Artificial Sequence:  Enzymatic Nucleic Acid
gaucucaaacagcagcu

SEQ ID NO: 2031 - RNA, 17 nt, Artificial Sequence
  Description of Artificial Sequence:  Enzymatic Nucleic Acid
guggccaaacaggaggu

SEQ ID NO: 2032 - RNA, 17 nt, Artificial Sequence
  Description of Artificial Sequence:  Enzymatic Nucleic Acid
aggaggugaucgauaag

SEQ ID NO: 2033 - RNA, 17 nt, Artificial Sequence
  Description of Artificial Sequence:  Enzymatic Nucleic Acid
ggugaucgauaagcuga

SEQ ID NO: 2034 - RNA, 17 nt, Artificial Sequence
  Description of Artificial Sequence:  Enzymatic Nucleic Acid
agcacaagauugugaug

SEQ ID NO: 2035 - RNA, 17 nt, Artificial Sequence
  Description of Artificial Sequence:  Enzymatic Nucleic Acid
agauugugauggagacc

SEQ ID NO: 2036 - RNA, 17 nt, Artificial Sequence
  Description of Artificial Sequence:  Enzymatic Nucleic Acid
ugauggagaccguuccg

SEQ ID NO: 2037 - RNA, 17 nt, Artificial Sequence
  Description of Artificial Sequence:  Enzymatic Nucleic Acid
ccaggcggauaucuaca

SEQ ID NO: 2038 - RNA, 17 nt, Artificial Sequence
  Description of Artificial Sequence:  Enzymatic Nucleic Acid
caaggcggacuuccagg

SEQ ID NO: 2039 - RNA, 17 nt, Artificial Sequence
  Description of Artificial Sequence:  Enzymatic Nucleic Acid
uacagcaaacugaaggc

SEQ ID NO: 2040 - RNA, 17 nt, Artificial Sequence
  Description of Artificial Sequence:  Enzymatic Nucleic Acid
cggccaggaucgaggac

SEQ ID NO: 2041 - RNA, 17 nt, Artificial Sequence
  Description of Artificial Sequence:  Enzymatic Nucleic Acid
gaucgaggacaugagga

SEQ ID NO: 2042 - RNA, 17 nt, Artificial Sequence
  Description of Artificial Sequence:  Enzymatic Nucleic Acid
gccaccugacuucugcu

SEQ ID NO: 2043 - RNA, 17 nt, Artificial Sequence
  Description of Artificial Sequence:  Enzymatic Nucleic Acid
ggccccugauauggaca

SEQ ID NO: 2044 - RNA, 17 nt, Artificial Sequence
  Description of Artificial Sequence:  Enzymatic Nucleic Acid
ugauauggacacccugc

SEQ ID NO: 2045 - RNA, 17 nt, Artificial Sequence
  Description of Artificial Sequence:  Enzymatic Nucleic Acid
cccugcagauacauguc

SEQ ID NO: 2046 - RNA, 17 nt, Artificial Sequence
  Description of Artificial Sequence:  Enzymatic Nucleic Acid
gcccgaggacgugcccg

SEQ ID NO: 2047 - RNA, 17 nt, Artificial Sequence
  Description of Artificial Sequence:  Enzymatic Nucleic Acid
ugcccgggaccgugcag

SEQ ID NO: 2048 - RNA, 17 nt, Artificial Sequence
  Description of Artificial Sequence:  Enzymatic Nucleic Acid
agcccaggaugaagggc

SEQ ID NO: 2049 - RNA, 17 nt, Artificial Sequence
  Description of Artificial Sequence:  Enzymatic Nucleic Acid
uggccacaacugggaug

SEQ ID NO: 2050 - RNA, 17 nt, Artificial Sequence
  Description of Artificial Sequence:  Enzymatic Nucleic Acid
caacugggaugccaccu

SEQ ID NO: 2051 - RNA, 17 nt, Artificial Sequence
  Description of Artificial Sequence:  Enzymatic Nucleic Acid
agcuguugauccgcugg

SEQ ID NO: 2052 - RNA, 17 nt, Artificial Sequence
  Description of Artificial Sequence:  Enzymatic Nucleic Acid
ugggguagaugcggccc

SEQ ID NO: 2053 - RNA, 17 nt, Artificial Sequence
  Description of Artificial Sequence:  Enzymatic Nucleic Acid
cggccccgaucaggccu

SEQ ID NO: 2054 - RNA, 17 nt, Artificial Sequence
  Description of Artificial Sequence:  Enzymatic Nucleic Acid
caggccugacucgcugc

SEQ ID NO: 2055 - RNA, 17 nt, Artificial Sequence
  Description of Artificial Sequence:  Enzymatic Nucleic Acid
cugcucgaaccacuugc

SEQ ID NO: 2056 - RNA, 17 nt, Artificial Sequence
  Description of Artificial Sequence:  Enzymatic Nucleic Acid
ucgggcuaaucccuccc

SEQ ID NO: 2057 - RNA, 17 nt, Artificial Sequence
  Description of Artificial Sequence:  Enzymatic Nucleic Acid
agucaagaauggggccu

SEQ ID NO: 2058 - RNA, 17 nt, Artificial Sequence
  Description of Artificial Sequence:  Enzymatic Nucleic Acid
cagggagaacugcuucc

SEQ ID NO: 2059 - RNA, 17 nt, Artificial Sequence
  Description of Artificial Sequence:  Enzymatic Nucleic Acid
cccaccggacaccgacc

SEQ ID NO: 2060 - RNA, 17 nt, Artificial Sequence
  Description of Artificial Sequence:  Enzymatic Nucleic Acid
ggacaccgacccgcccg

SEQ ID NO: 2061 - RNA, 17 nt, Artificial Sequence
  Description of Artificial Sequence:  Enzymatic Nucleic Acid
gcagccagaccgaugug

SEQ ID NO: 2062 - RNA, 17 nt, Artificial Sequence
  Description of Artificial Sequence:  Enzymatic Nucleic Acid
ccagaccgauguguauu

SEQ ID NO: 2063 - RNA, 17 nt, Artificial Sequence
  Description of Artificial Sequence:  Enzymatic Nucleic Acid
uguauuuaaccagucac

SEQ ID NO: 2064 - RNA, 17 nt, Artificial Sequence
  Description of Artificial Sequence:  Enzymatic Nucleic Acid
cacuauugauggacauu

SEQ ID NO: 2065 - RNA, 17 nt, Artificial Sequence
  Description of Artificial Sequence:  Enzymatic Nucleic Acid
auugauggacauuuggg

SEQ ID NO: 2066 - RNA, 17 nt, Artificial Sequence
  Description of Artificial Sequence:  Enzymatic Nucleic Acid
uaccauaaauaauggca

SEQ ID NO: 2067 - RNA, 17 nt, Artificial Sequence
  Description of Artificial Sequence:  Enzymatic Nucleic Acid
cauaaauaauggcauag

SEQ ID NO: 2068 - RNA, 17 nt, Artificial Sequence
  Description of Artificial Sequence:  Enzymatic Nucleic Acid
acgagcauggcccuugu

SEQ ID NO: 2069 - RNA, 17 nt, Artificial Sequence
  Description of Artificial Sequence:  Enzymatic Nucleic Acid
gcccuugugauccaggu

SEQ ID NO: 2070 - RNA, 17 nt, Artificial Sequence
  Description of Artificial Sequence:  Enzymatic Nucleic Acid
gugauccagguggggaa

SEQ ID NO: 2071 - RNA, 17 nt, Artificial Sequence
  Description of Artificial Sequence:  Enzymatic Nucleic Acid
auccagguggggaaacu

SEQ ID NO: 2072 - RNA, 17 nt, Artificial Sequence
  Description of Artificial Sequence:  Enzymatic Nucleic Acid
uccagguggggaaacua

SEQ ID NO: 2073 - RNA, 17 nt, Artificial Sequence
  Description of Artificial Sequence:  Enzymatic Nucleic Acid
ccagguggggaaacuaa

SEQ ID NO: 2074 - RNA, 17 nt, Artificial Sequence
  Description of Artificial Sequence:  Enzymatic Nucleic Acid
cagguggggaaacuaag

SEQ ID NO: 2075 - RNA, 17 nt, Artificial Sequence
  Description of Artificial Sequence:  Enzymatic Nucleic Acid
gaaacuaaggcccagag

SEQ ID NO: 2076 - RNA, 17 nt, Artificial Sequence
  Description of Artificial Sequence:  Enzymatic Nucleic Acid
aaggcccagagaaguga

SEQ ID NO: 2077 - RNA, 17 nt, Artificial Sequence
  Description of Artificial Sequence:  Enzymatic Nucleic Acid
ggcccagagaagugagg

SEQ ID NO: 2078 - RNA, 17 nt, Artificial Sequence
  Description of Artificial Sequence:  Enzymatic Nucleic Acid
agagaagugaggacccc

SEQ ID NO: 2079 - RNA, 17 nt, Artificial Sequence
  Description of Artificial Sequence:  Enzymatic Nucleic Acid
agaagugaggaccccgc

SEQ ID NO: 2080 - RNA, 17 nt, Artificial Sequence
  Description of Artificial Sequence:  Enzymatic Nucleic Acid
gaagugaggaccccgca

SEQ ID NO: 2081 - RNA, 17 nt, Artificial Sequence
  Description of Artificial Sequence:  Enzymatic Nucleic Acid
accccgcagacuaucaa

SEQ ID NO: 2082 - RNA, 17 nt, Artificial Sequence
  Description of Artificial Sequence:  Enzymatic Nucleic Acid
cucccugugaagcucuc

SEQ ID NO: 2083 - RNA, 17 nt, Artificial Sequence
  Description of Artificial Sequence:  Enzymatic Nucleic Acid
gcaucaucgagguccca

SEQ ID NO: 2084 - RNA, 17 nt, Artificial Sequence
  Description of Artificial Sequence:  Enzymatic Nucleic Acid
aucaucgaggucccauc

SEQ ID NO: 2085 - RNA, 17 nt, Artificial Sequence
  Description of Artificial Sequence:  Enzymatic Nucleic Acid
gcccuguuggaugaaua

SEQ ID NO: 2086 - RNA, 17 nt, Artificial Sequence
  Description of Artificial Sequence:  Enzymatic Nucleic Acid
cccuguuggaugaauag

SEQ ID NO: 2087 - RNA, 17 nt, Artificial Sequence
  Description of Artificial Sequence:  Enzymatic Nucleic Acid
uguuggaugaauaggca

SEQ ID NO: 2088 - RNA, 17 nt, Artificial Sequence
  Description of Artificial Sequence:  Enzymatic Nucleic Acid
gaugaauaggcaccucu

SEQ ID NO: 2089 - RNA, 17 nt, Artificial Sequence
  Description of Artificial Sequence:  Enzymatic Nucleic Acid
gcaccucuggaagagcc

SEQ ID NO: 2090 - RNA, 17 nt, Artificial Sequence
  Description of Artificial Sequence:  Enzymatic Nucleic Acid
caccucuggaagagcca

SEQ ID NO: 2091 - RNA, 17 nt, Artificial Sequence
  Description of Artificial Sequence:  Enzymatic Nucleic Acid
cucuggaagagccaacu

SEQ ID NO: 2092 - RNA, 17 nt, Artificial Sequence
  Description of Artificial Sequence:  Enzymatic Nucleic Acid
aacugugugagauggug

SEQ ID NO: 2093 - RNA, 17 nt, Artificial Sequence
  Description of Artificial Sequence:  Enzymatic Nucleic Acid
cugugugagauggugca

SEQ ID NO: 2094 - RNA, 17 nt, Artificial Sequence
  Description of Artificial Sequence:  Enzymatic Nucleic Acid
ugugagauggugcagcc

SEQ ID NO: 2095 - RNA, 17 nt, Artificial Sequence
  Description of Artificial Sequence:  Enzymatic Nucleic Acid
agcccagugguggcccg

SEQ ID NO: 2096 - RNA, 17 nt, Artificial Sequence
  Description of Artificial Sequence:  Enzymatic Nucleic Acid
ccagugguggcccggca

SEQ ID NO: 2097 - RNA, 17 nt, Artificial Sequence
  Description of Artificial Sequence:  Enzymatic Nucleic Acid
gguggcccggcagcaga

SEQ ID NO: 2098 - RNA, 17 nt, Artificial Sequence
  Description of Artificial Sequence:  Enzymatic Nucleic Acid
cggcagcagaucaggac

SEQ ID NO: 2099 - RNA, 17 nt, Artificial Sequence
  Description of Artificial Sequence:  Enzymatic Nucleic Acid
gcagaucaggacguacu

SEQ ID NO: 2100 - RNA, 17 nt, Artificial Sequence
  Description of Artificial Sequence:  Enzymatic Nucleic Acid
cagaucaggacguacug

SEQ ID NO: 2101 - RNA, 17 nt, Artificial Sequence
  Description of Artificial Sequence:  Enzymatic Nucleic Acid
gacguacugggcgaaga

SEQ ID NO: 2102 - RNA, 17 nt, Artificial Sequence
  Description of Artificial Sequence:  Enzymatic Nucleic Acid
acguacugggcgaagag

SEQ ID NO: 2103 - RNA, 17 nt, Artificial Sequence
  Description of Artificial Sequence:  Enzymatic Nucleic Acid
uacugggcgaagagucu

SEQ ID NO: 2104 - RNA, 17 nt, Artificial Sequence
  Description of Artificial Sequence:  Enzymatic Nucleic Acid
ugggcgaagagucuccu

SEQ ID NO: 2105 - RNA, 17 nt, Artificial Sequence
  Description of Artificial Sequence:  Enzymatic Nucleic Acid
ucuccucuggggaagcc

SEQ ID NO: 2106 - RNA, 17 nt, Artificial Sequence
  Description of Artificial Sequence:  Enzymatic Nucleic Acid
cuccucuggggaagcca

SEQ ID NO: 2107 - RNA, 17 nt, Artificial Sequence
  Description of Artificial Sequence:  Enzymatic Nucleic Acid
uccucuggggaagccag

SEQ ID NO: 2108 - RNA, 17 nt, Artificial Sequence
  Description of Artificial Sequence:  Enzymatic Nucleic Acid
ccucuggggaagccagc

SEQ ID NO: 2109 - RNA, 17 nt, Artificial Sequence
  Description of Artificial Sequence:  Enzymatic Nucleic Acid
ugccuucagaacagggc

SEQ ID NO: 2110 - RNA, 17 nt, Artificial Sequence
  Description of Artificial Sequence:  Enzymatic Nucleic Acid
ucagaacagggcgcucc

SEQ ID NO: 2111 - RNA, 17 nt, Artificial Sequence
  Description of Artificial Sequence:  Enzymatic Nucleic Acid
cagaacagggcgcuccu

SEQ ID NO: 2112 - RNA, 17 nt, Artificial Sequence
  Description of Artificial Sequence:  Enzymatic Nucleic Acid
gcgcuccugagacccuc

SEQ ID NO: 2113 - RNA, 17 nt, Artificial Sequence
  Description of Artificial Sequence:  Enzymatic Nucleic Acid
gcuccugagacccucca

SEQ ID NO: 2114 - RNA, 17 nt, Artificial Sequence
  Description of Artificial Sequence:  Enzymatic Nucleic Acid
cgcugccuggaggagaa

SEQ ID NO: 2115 - RNA, 17 nt, Artificial Sequence
  Description of Artificial Sequence:  Enzymatic Nucleic Acid
gcugccuggaggagaau

SEQ ID NO: 2116 - RNA, 17 nt, Artificial Sequence
  Description of Artificial Sequence:  Enzymatic Nucleic Acid
ugccuggaggagaauca

SEQ ID NO: 2117 - RNA, 17 nt, Artificial Sequence
  Description of Artificial Sequence:  Enzymatic Nucleic Acid
gccuggaggagaaucaa

SEQ ID NO: 2118 - RNA, 17 nt, Artificial Sequence
  Description of Artificial Sequence:  Enzymatic Nucleic Acid
cuggaggagaaucaaga

SEQ ID NO: 2119 - RNA, 17 nt, Artificial Sequence
  Description of Artificial Sequence:  Enzymatic Nucleic Acid
agaaucaagagcuccga

SEQ ID NO: 2120 - RNA, 17 nt, Artificial Sequence
  Description of Artificial Sequence:  Enzymatic Nucleic Acid
agagcuccgagaugcca

SEQ ID NO: 2121 - RNA, 17 nt, Artificial Sequence
  Description of Artificial Sequence:  Enzymatic Nucleic Acid
agcuccgagaugccauc

SEQ ID NO: 2122 - RNA, 17 nt, Artificial Sequence
  Description of Artificial Sequence:  Enzymatic Nucleic Acid
ugccauccggcagagca

SEQ ID NO: 2123 - RNA, 17 nt, Artificial Sequence
  Description of Artificial Sequence:  Enzymatic Nucleic Acid
auccggcagagcaacca

SEQ ID NO: 2124 - RNA, 17 nt, Artificial Sequence
  Description of Artificial Sequence:  Enzymatic Nucleic Acid
agcaaccagauucugcg

SEQ ID NO: 2125 - RNA, 17 nt, Artificial Sequence
  Description of Artificial Sequence:  Enzymatic Nucleic Acid
gauucugcgggagcgcu

SEQ ID NO: 2126 - RNA, 17 nt, Artificial Sequence
  Description of Artificial Sequence:  Enzymatic Nucleic Acid
auucugcgggagcgcug

SEQ ID NO: 2127 - RNA, 17 nt, Artificial Sequence
  Description of Artificial Sequence:  Enzymatic Nucleic Acid
uucugcgggagcgcugc

SEQ ID NO: 2128 - RNA, 17 nt, Artificial Sequence
  Description of Artificial Sequence:  Enzymatic Nucleic Acid
agcgcugcgaggagcuu

SEQ ID NO: 2129 - RNA, 17 nt, Artificial Sequence
  Description of Artificial Sequence:  Enzymatic Nucleic Acid
cgcugcgaggagcuucu

SEQ ID NO: 2130 - RNA, 17 nt, Artificial Sequence
  Description of Artificial Sequence:  Enzymatic Nucleic Acid
gcugcgaggagcuucug

SEQ ID NO: 2131 - RNA, 17 nt, Artificial Sequence
  Description of Artificial Sequence:  Enzymatic Nucleic Acid
gccagccagagggagga

SEQ ID NO: 2132 - RNA, 17 nt, Artificial Sequence
  Description of Artificial Sequence:  Enzymatic Nucleic Acid
cagccagagggaggaga

SEQ ID NO: 2133 - RNA, 17 nt, Artificial Sequence
  Description of Artificial Sequence:  Enzymatic Nucleic Acid
agccagagggaggagaa

SEQ ID NO: 2134 - RNA, 17 nt, Artificial Sequence
  Description of Artificial Sequence:  Enzymatic Nucleic Acid
gccagagggaggagaag

SEQ ID NO: 2135 - RNA, 17 nt, Artificial Sequence
  Description of Artificial Sequence:  Enzymatic Nucleic Acid
cagagggaggagaagga

SEQ ID NO: 2136 - RNA, 17 nt, Artificial Sequence
  Description of Artificial Sequence:  Enzymatic Nucleic Acid
agagggaggagaaggag

SEQ ID NO: 2137 - RNA, 17 nt, Artificial Sequence
  Description of Artificial Sequence:  Enzymatic Nucleic Acid
agggaggagaaggaguu

SEQ ID NO: 2138 - RNA, 17 nt, Artificial Sequence
  Description of Artificial Sequence:  Enzymatic Nucleic Acid
gaggagaaggaguuccu

SEQ ID NO: 2139 - RNA, 17 nt, Artificial Sequence
  Description of Artificial Sequence:  Enzymatic Nucleic Acid
aggagaaggaguuccuc

SEQ ID NO: 2140 - RNA, 17 nt, Artificial Sequence
  Description of Artificial Sequence:  Enzymatic Nucleic Acid
aaguuccaggaggccag

SEQ ID NO: 2141 - RNA, 17 nt, Artificial Sequence
  Description of Artificial Sequence:  Enzymatic Nucleic Acid
aguuccaggaggccagg

SEQ ID NO: 2142 - RNA, 17 nt, Artificial Sequence
  Description of Artificial Sequence:  Enzymatic Nucleic Acid
uuccaggaggccaggaa

SEQ ID NO: 2143 - RNA, 17 nt, Artificial Sequence
  Description of Artificial Sequence:  Enzymatic Nucleic Acid
ggaggccaggaaacugg

SEQ ID NO: 2144 - RNA, 17 nt, Artificial Sequence
  Description of Artificial Sequence:  Enzymatic Nucleic Acid
gaggccaggaaacuggu

SEQ ID NO: 2145 - RNA, 17 nt, Artificial Sequence
  Description of Artificial Sequence:  Enzymatic Nucleic Acid
aggaaacugguggagag

SEQ ID NO: 2146 - RNA, 17 nt, Artificial Sequence
  Description of Artificial Sequence:  Enzymatic Nucleic Acid
aaacugguggagagacu

SEQ ID NO: 2147 - RNA, 17 nt, Artificial Sequence
  Description of Artificial Sequence:  Enzymatic Nucleic Acid
aacugguggagagacuc

SEQ ID NO: 2148 - RNA, 17 nt, Artificial Sequence
  Description of Artificial Sequence:  Enzymatic Nucleic Acid
cugguggagagacucgg

SEQ ID NO: 2149 - RNA, 17 nt, Artificial Sequence
  Description of Artificial Sequence:  Enzymatic Nucleic Acid
gguggagagacucggcc

SEQ ID NO: 2150 - RNA, 17 nt, Artificial Sequence
  Description of Artificial Sequence:  Enzymatic Nucleic Acid
agagacucggccuggag

SEQ ID NO: 2151 - RNA, 17 nt, Artificial Sequence
  Description of Artificial Sequence:  Enzymatic Nucleic Acid
cucggccuggagaagcu

SEQ ID NO: 2152 - RNA, 17 nt, Artificial Sequence
  Description of Artificial Sequence:  Enzymatic Nucleic Acid
ucggccuggagaagcuc

SEQ ID NO: 2153 - RNA, 17 nt, Artificial Sequence
  Description of Artificial Sequence:  Enzymatic Nucleic Acid
ggccuggagaagcucga

SEQ ID NO: 2154 - RNA, 17 nt, Artificial Sequence
  Description of Artificial Sequence:  Enzymatic Nucleic Acid
agaagcucgaucugaag

SEQ ID NO: 2155 - RNA, 17 nt, Artificial Sequence
  Description of Artificial Sequence:  Enzymatic Nucleic Acid
cucgaucugaagaggca

SEQ ID NO: 2156 - RNA, 17 nt, Artificial Sequence
  Description of Artificial Sequence:  Enzymatic Nucleic Acid
gaucugaagaggcagaa

SEQ ID NO: 2157 - RNA, 17 nt, Artificial Sequence
  Description of Artificial Sequence:  Enzymatic Nucleic Acid
ucugaagaggcagaagg

SEQ ID NO: 2158 - RNA, 17 nt, Artificial Sequence
  Description of Artificial Sequence:  Enzymatic Nucleic Acid
aagaggcagaaggagca

SEQ ID NO: 2159 - RNA, 17 nt, Artificial Sequence
  Description of Artificial Sequence:  Enzymatic Nucleic Acid
aggcagaaggagcaggc

SEQ ID NO: 2160 - RNA, 17 nt, Artificial Sequence
  Description of Artificial Sequence:  Enzymatic Nucleic Acid
ggcagaaggagcaggcu

SEQ ID NO: 2161 - RNA, 17 nt, Artificial Sequence
  Description of Artificial Sequence:  Enzymatic Nucleic Acid
aaggagcaggcucugcg

SEQ ID NO: 2162 - RNA, 17 nt, Artificial Sequence
  Description of Artificial Sequence:  Enzymatic Nucleic Acid
ggcucugcgggaggugg

SEQ ID NO: 2163 - RNA, 17 nt, Artificial Sequence
  Description of Artificial Sequence:  Enzymatic Nucleic Acid
gcucugcgggaggugga

SEQ ID NO: 2164 - RNA, 17 nt, Artificial Sequence
  Description of Artificial Sequence:  Enzymatic Nucleic Acid
cucugcgggagguggag

SEQ ID NO: 2165 - RNA, 17 nt, Artificial Sequence
  Description of Artificial Sequence:  Enzymatic Nucleic Acid
cugcgggagguggagca

SEQ ID NO: 2166 - RNA, 17 nt, Artificial Sequence
  Description of Artificial Sequence:  Enzymatic Nucleic Acid
cgggagguggagcaccu

SEQ ID NO: 2167 - RNA, 17 nt, Artificial Sequence
  Description of Artificial Sequence:  Enzymatic Nucleic Acid
gggagguggagcaccug

SEQ ID NO: 2168 - RNA, 17 nt, Artificial Sequence
  Description of Artificial Sequence:  Enzymatic Nucleic Acid
gagcaccugaagagaug

SEQ ID NO: 2169 - RNA, 17 nt, Artificial Sequence
  Description of Artificial Sequence:  Enzymatic Nucleic Acid
caccugaagagaugcca

SEQ ID NO: 2170 - RNA, 17 nt, Artificial Sequence
  Description of Artificial Sequence:  Enzymatic Nucleic Acid
ccugaagagaugccagc

SEQ ID NO: 2171 - RNA, 17 nt, Artificial Sequence
  Description of Artificial Sequence:  Enzymatic Nucleic Acid
cagcagcagauggcuga

SEQ ID NO: 2172 - RNA, 17 nt, Artificial Sequence
  Description of Artificial Sequence:  Enzymatic Nucleic Acid
cagcagauggcugagga

SEQ ID NO: 2173 - RNA, 17 nt, Artificial Sequence
  Description of Artificial Sequence:  Enzymatic Nucleic Acid
agauggcugaggacaag

SEQ ID NO: 2174 - RNA, 17 nt, Artificial Sequence
  Description of Artificial Sequence:  Enzymatic Nucleic Acid
auggcugaggacaaggc

SEQ ID NO: 2175 - RNA, 17 nt, Artificial Sequence
  Description of Artificial Sequence:  Enzymatic Nucleic Acid
uggcugaggacaaggcc

SEQ ID NO: 2176 - RNA, 17 nt, Artificial Sequence
  Description of Artificial Sequence:  Enzymatic Nucleic Acid
gaggacaaggccucugu

SEQ ID NO: 2177 - RNA, 17 nt, Artificial Sequence
  Description of Artificial Sequence:  Enzymatic Nucleic Acid
gccucugugaaagccca

SEQ ID NO: 2178 - RNA, 17 nt, Artificial Sequence
  Description of Artificial Sequence:  Enzymatic Nucleic Acid
aaagcccaggugacguc

SEQ ID NO: 2179 - RNA, 17 nt, Artificial Sequence
  Description of Artificial Sequence:  Enzymatic Nucleic Acid
gcccaggugacguccuu

SEQ ID NO: 2180 - RNA, 17 nt, Artificial Sequence
  Description of Artificial Sequence:  Enzymatic Nucleic Acid
ccuugcucggggagcug

SEQ ID NO: 2181 - RNA, 17 nt, Artificial Sequence
  Description of Artificial Sequence:  Enzymatic Nucleic Acid
cuugcucggggagcugc

SEQ ID NO: 2182 - RNA, 17 nt, Artificial Sequence
  Description of Artificial Sequence:  Enzymatic Nucleic Acid
uugcucggggagcugca

SEQ ID NO: 2183 - RNA, 17 nt, Artificial Sequence
  Description of Artificial Sequence:  Enzymatic Nucleic Acid
ugcucggggagcugcag

SEQ ID NO: 2184 - RNA, 17 nt, Artificial Sequence
  Description of Artificial Sequence:  Enzymatic Nucleic Acid
gagcugcaggagagcca

SEQ ID NO: 2185 - RNA, 17 nt, Artificial Sequence
  Description of Artificial Sequence:  Enzymatic Nucleic Acid
agcugcaggagagccag

SEQ ID NO: 2186 - RNA, 17 nt, Artificial Sequence
  Description of Artificial Sequence:  Enzymatic Nucleic Acid
cugcaggagagccagag

SEQ ID NO: 2187 - RNA, 17 nt, Artificial Sequence
  Description of Artificial Sequence:  Enzymatic Nucleic Acid
gagagccagagucgcuu

SEQ ID NO: 2188 - RNA, 17 nt, Artificial Sequence
  Description of Artificial Sequence:  Enzymatic Nucleic Acid
agucgcuuggaggcugc

SEQ ID NO: 2189 - RNA, 17 nt, Artificial Sequence
  Description of Artificial Sequence:  Enzymatic Nucleic Acid
gucgcuuggaggcugcc

SEQ ID NO: 2190 - RNA, 17 nt, Artificial Sequence
  Description of Artificial Sequence:  Enzymatic Nucleic Acid
cgcuuggaggcugccac

SEQ ID NO: 2191 - RNA, 17 nt, Artificial Sequence
  Description of Artificial Sequence:  Enzymatic Nucleic Acid
gccacuaaggaaugcca

SEQ ID NO: 2192 - RNA, 17 nt, Artificial Sequence
  Description of Artificial Sequence:  Enzymatic Nucleic Acid
ccacuaaggaaugccag

SEQ ID NO: 2193 - RNA, 17 nt, Artificial Sequence
  Description of Artificial Sequence:  Enzymatic Nucleic Acid
gaaugccaggcucugga

SEQ ID NO: 2194 - RNA, 17 nt, Artificial Sequence
  Description of Artificial Sequence:  Enzymatic Nucleic Acid
caggcucuggagggucg

SEQ ID NO: 2195 - RNA, 17 nt, Artificial Sequence
  Description of Artificial Sequence:  Enzymatic Nucleic Acid
aggcucuggagggucgg

SEQ ID NO: 2196 - RNA, 17 nt, Artificial Sequence
  Description of Artificial Sequence:  Enzymatic Nucleic Acid
gcucuggagggucgggc

SEQ ID NO: 2197 - RNA, 17 nt, Artificial Sequence
  Description of Artificial Sequence:  Enzymatic Nucleic Acid
cucuggagggucgggcc

SEQ ID NO: 2198 - RNA, 17 nt, Artificial Sequence
  Description of Artificial Sequence:  Enzymatic Nucleic Acid
ggagggucgggcccggg

SEQ ID NO: 2199 - RNA, 17 nt, Artificial Sequence
  Description of Artificial Sequence:  Enzymatic Nucleic Acid
gagggucgggcccgggc

SEQ ID NO: 2200 - RNA, 17 nt, Artificial Sequence
  Description of Artificial Sequence:  Enzymatic Nucleic Acid
ucgggcccgggcggcca

SEQ ID NO: 2201 - RNA, 17 nt, Artificial Sequence
  Description of Artificial Sequence:  Enzymatic Nucleic Acid
cgggcccgggcggccag

SEQ ID NO: 2202 - RNA, 17 nt, Artificial Sequence
  Description of Artificial Sequence:  Enzymatic Nucleic Acid
gcccgggcggccagcga

SEQ ID NO: 2203 - RNA, 17 nt, Artificial Sequence
  Description of Artificial Sequence:  Enzymatic Nucleic Acid
cggccagcgagcaggcg

SEQ ID NO: 2204 - RNA, 17 nt, Artificial Sequence
  Description of Artificial Sequence:  Enzymatic Nucleic Acid
agcgagcaggcgcggca

SEQ ID NO: 2205 - RNA, 17 nt, Artificial Sequence
  Description of Artificial Sequence:  Enzymatic Nucleic Acid
gcaggcgcggcagcugg

SEQ ID NO: 2206 - RNA, 17 nt, Artificial Sequence
  Description of Artificial Sequence:  Enzymatic Nucleic Acid
cggcagcuggagaguga

SEQ ID NO: 2207 - RNA, 17 nt, Artificial Sequence
  Description of Artificial Sequence:  Enzymatic Nucleic Acid
ggcagcuggagagugag

SEQ ID NO: 2208 - RNA, 17 nt, Artificial Sequence
  Description of Artificial Sequence:  Enzymatic Nucleic Acid
cagcuggagagugagcg

SEQ ID NO: 2209 - RNA, 17 nt, Artificial Sequence
  Description of Artificial Sequence:  Enzymatic Nucleic Acid
uggagagugagcgcgag

SEQ ID NO: 2210 - RNA, 17 nt, Artificial Sequence
  Description of Artificial Sequence:  Enzymatic Nucleic Acid
gugagcgcgaggcgcug

SEQ ID NO: 2211 - RNA, 17 nt, Artificial Sequence
  Description of Artificial Sequence:  Enzymatic Nucleic Acid
gagcgcgaggcgcugca

SEQ ID NO: 2212 - RNA, 17 nt, Artificial Sequence
  Description of Artificial Sequence:  Enzymatic Nucleic Acid
agcgugcagguggacca

SEQ ID NO: 2213 - RNA, 17 nt, Artificial Sequence
  Description of Artificial Sequence:  Enzymatic Nucleic Acid
gugcagguggaccagcu

SEQ ID NO: 2214 - RNA, 17 nt, Artificial Sequence
  Description of Artificial Sequence:  Enzymatic Nucleic Acid
ugcagguggaccagcug

SEQ ID NO: 2215 - RNA, 17 nt, Artificial Sequence
  Description of Artificial Sequence:  Enzymatic Nucleic Acid
cgcaugcagggccagag

SEQ ID NO: 2216 - RNA, 17 nt, Artificial Sequence
  Description of Artificial Sequence:  Enzymatic Nucleic Acid
gcaugcagggccagagc

SEQ ID NO: 2217 - RNA, 17 nt, Artificial Sequence
  Description of Artificial Sequence:  Enzymatic Nucleic Acid
cagggccagagcgugga

SEQ ID NO: 2218 - RNA, 17 nt, Artificial Sequence
  Description of Artificial Sequence:  Enzymatic Nucleic Acid
cagagcguggaggccgc

SEQ ID NO: 2219 - RNA, 17 nt, Artificial Sequence
  Description of Artificial Sequence:  Enzymatic Nucleic Acid
agagcguggaggccgcg

SEQ ID NO: 2220 - RNA, 17 nt, Artificial Sequence
  Description of Artificial Sequence:  Enzymatic Nucleic Acid
agcguggaggccgcgcu

SEQ ID NO: 2221 - RNA, 17 nt, Artificial Sequence
  Description of Artificial Sequence:  Enzymatic Nucleic Acid
cuccgcauggagcgcca

SEQ ID NO: 2222 - RNA, 17 nt, Artificial Sequence
  Description of Artificial Sequence:  Enzymatic Nucleic Acid
uccgcauggagcgccag

SEQ ID NO: 2223 - RNA, 17 nt, Artificial Sequence
  Description of Artificial Sequence:  Enzymatic Nucleic Acid
gagcgccaggccgccuc

SEQ ID NO: 2224 - RNA, 17 nt, Artificial Sequence
  Description of Artificial Sequence:  Enzymatic Nucleic Acid
gccgccucggaggagaa

SEQ ID NO: 2225 - RNA, 17 nt, Artificial Sequence
  Description of Artificial Sequence:  Enzymatic Nucleic Acid
ccgccucggaggagaag

SEQ ID NO: 2226 - RNA, 17 nt, Artificial Sequence
  Description of Artificial Sequence:  Enzymatic Nucleic Acid
gccucggaggagaagag

SEQ ID NO: 2227 - RNA, 17 nt, Artificial Sequence
  Description of Artificial Sequence:  Enzymatic Nucleic Acid
ccucggaggagaagagg

SEQ ID NO: 2228 - RNA, 17 nt, Artificial Sequence
  Description of Artificial Sequence:  Enzymatic Nucleic Acid
ucggaggagaagaggaa

SEQ ID NO: 2229 - RNA, 17 nt, Artificial Sequence
  Description of Artificial Sequence:  Enzymatic Nucleic Acid
gaggagaagaggaagcu

SEQ ID NO: 2230 - RNA, 17 nt, Artificial Sequence
  Description of Artificial Sequence:  Enzymatic Nucleic Acid
ggagaagaggaagcugg

SEQ ID NO: 2231 - RNA, 17 nt, Artificial Sequence
  Description of Artificial Sequence:  Enzymatic Nucleic Acid
gagaagaggaagcuggc

SEQ ID NO: 2232 - RNA, 17 nt, Artificial Sequence
  Description of Artificial Sequence:  Enzymatic Nucleic Acid
aggaagcuggcccaguu

SEQ ID NO: 2233 - RNA, 17 nt, Artificial Sequence
  Description of Artificial Sequence:  Enzymatic Nucleic Acid
caguugcagguggccua

SEQ ID NO: 2234 - RNA, 17 nt, Artificial Sequence
  Description of Artificial Sequence:  Enzymatic Nucleic Acid
uugcagguggccuauca

SEQ ID NO: 2235 - RNA, 17 nt, Artificial Sequence
  Description of Artificial Sequence:  Enzymatic Nucleic Acid
ucuuccaagaauacgac

SEQ ID NO: 2236 - RNA, 17 nt, Artificial Sequence
  Description of Artificial Sequence:  Enzymatic Nucleic Acid
aagaauacgacaaccac

SEQ ID NO: 2237 - RNA, 17 nt, Artificial Sequence
  Description of Artificial Sequence:  Enzymatic Nucleic Acid
cacaucaagagcagcgu

SEQ ID NO: 2238 - RNA, 17 nt, Artificial Sequence
  Description of Artificial Sequence:  Enzymatic Nucleic Acid
agcagcguggugggcag

SEQ ID NO: 2239 - RNA, 17 nt, Artificial Sequence
  Description of Artificial Sequence:  Enzymatic Nucleic Acid
agcguggugggcaguga

SEQ ID NO: 2240 - RNA, 17 nt, Artificial Sequence
  Description of Artificial Sequence:  Enzymatic Nucleic Acid
gcguggugggcagugag

SEQ ID NO: 2241 - RNA, 17 nt, Artificial Sequence
  Description of Artificial Sequence:  Enzymatic Nucleic Acid
ugggcagugagcggaag

SEQ ID NO: 2242 - RNA, 17 nt, Artificial Sequence
  Description of Artificial Sequence:  Enzymatic Nucleic Acid
cagugagcggaagcgag

SEQ ID NO: 2243 - RNA, 17 nt, Artificial Sequence
  Description of Artificial Sequence:  Enzymatic Nucleic Acid
agugagcggaagcgagg

SEQ ID NO: 2244 - RNA, 17 nt, Artificial Sequence
  Description of Artificial Sequence:  Enzymatic Nucleic Acid
gcggaagcgaggaaugc

SEQ ID NO: 2245 - RNA, 17 nt, Artificial Sequence
  Description of Artificial Sequence:  Enzymatic Nucleic Acid
ggaagcgaggaaugcag

SEQ ID NO: 2246 - RNA, 17 nt, Artificial Sequence
  Description of Artificial Sequence:  Enzymatic Nucleic Acid
gaagcgaggaaugcagc

SEQ ID NO: 2247 - RNA, 17 nt, Artificial Sequence
  Description of Artificial Sequence:  Enzymatic Nucleic Acid
augcagcuggaagaucu

SEQ ID NO: 2248 - RNA, 17 nt, Artificial Sequence
  Description of Artificial Sequence:  Enzymatic Nucleic Acid
ugcagcuggaagaucuc

SEQ ID NO: 2249 - RNA, 17 nt, Artificial Sequence
  Description of Artificial Sequence:  Enzymatic Nucleic Acid
agcuggaagaucucaaa

SEQ ID NO: 2250 - RNA, 17 nt, Artificial Sequence
  Description of Artificial Sequence:  Enzymatic Nucleic Acid
cuccagcaggccgagga

SEQ ID NO: 2251 - RNA, 17 nt, Artificial Sequence
  Description of Artificial Sequence:  Enzymatic Nucleic Acid
agcaggccgaggaggcc

SEQ ID NO: 2252 - RNA, 17 nt, Artificial Sequence
  Description of Artificial Sequence:  Enzymatic Nucleic Acid
caggccgaggaggcccu

SEQ ID NO: 2253 - RNA, 17 nt, Artificial Sequence
  Description of Artificial Sequence:  Enzymatic Nucleic Acid
aggccgaggaggcccug

SEQ ID NO: 2254 - RNA, 17 nt, Artificial Sequence
  Description of Artificial Sequence:  Enzymatic Nucleic Acid
gccgaggaggcccuggu

SEQ ID NO: 2255 - RNA, 17 nt, Artificial Sequence
  Description of Artificial Sequence:  Enzymatic Nucleic Acid
gaggcccugguggccaa

SEQ ID NO: 2256 - RNA, 17 nt, Artificial Sequence
  Description of Artificial Sequence:  Enzymatic Nucleic Acid
gcccugguggccaaaca

SEQ ID NO: 2257 - RNA, 17 nt, Artificial Sequence
  Description of Artificial Sequence:  Enzymatic Nucleic Acid
gccaaacaggaggugau

SEQ ID NO: 2258 - RNA, 17 nt, Artificial Sequence
  Description of Artificial Sequence:  Enzymatic Nucleic Acid
ccaaacaggaggugauc

SEQ ID NO: 2259 - RNA, 17 nt, Artificial Sequence
  Description of Artificial Sequence:  Enzymatic Nucleic Acid
aaacaggaggugaucga

SEQ ID NO: 2260 - RNA, 17 nt, Artificial Sequence
  Description of Artificial Sequence:  Enzymatic Nucleic Acid
caggaggugaucgauaa

SEQ ID NO: 2261 - RNA, 17 nt, Artificial Sequence
  Description of Artificial Sequence:  Enzymatic Nucleic Acid
aggugaucgauaagcug

SEQ ID NO: 2262 - RNA, 17 nt, Artificial Sequence
  Description of Artificial Sequence:  Enzymatic Nucleic Acid
gauaagcugaaggagga

SEQ ID NO: 2263 - RNA, 17 nt, Artificial Sequence
  Description of Artificial Sequence:  Enzymatic Nucleic Acid
aagcugaaggaggaggc

SEQ ID NO: 2264 - RNA, 17 nt, Artificial Sequence
  Description of Artificial Sequence:  Enzymatic Nucleic Acid
agcugaaggaggaggcc

SEQ ID NO: 2265 - RNA, 17 nt, Artificial Sequence
  Description of Artificial Sequence:  Enzymatic Nucleic Acid
cugaaggaggaggccga

SEQ ID NO: 2266 - RNA, 17 nt, Artificial Sequence
  Description of Artificial Sequence:  Enzymatic Nucleic Acid
ugaaggaggaggccgag

SEQ ID NO: 2267 - RNA, 17 nt, Artificial Sequence
  Description of Artificial Sequence:  Enzymatic Nucleic Acid
aaggaggaggccgagca

SEQ ID NO: 2268 - RNA, 17 nt, Artificial Sequence
  Description of Artificial Sequence:  Enzymatic Nucleic Acid
aggaggccgagcagcac

SEQ ID NO: 2269 - RNA, 17 nt, Artificial Sequence
  Description of Artificial Sequence:  Enzymatic Nucleic Acid
cagcacaagauugugau

SEQ ID NO: 2270 - RNA, 17 nt, Artificial Sequence
  Description of Artificial Sequence:  Enzymatic Nucleic Acid
aagauugugauggagac

SEQ ID NO: 2271 - RNA, 17 nt, Artificial Sequence
  Description of Artificial Sequence:  Enzymatic Nucleic Acid
auugugauggagaccgu

SEQ ID NO: 2272 - RNA, 17 nt, Artificial Sequence
  Description of Artificial Sequence:  Enzymatic Nucleic Acid
uugugauggagaccguu

SEQ ID NO: 2273 - RNA, 17 nt, Artificial Sequence
  Description of Artificial Sequence:  Enzymatic Nucleic Acid
gugauggagaccguucc

SEQ ID NO: 2274 - RNA, 17 nt, Artificial Sequence
  Description of Artificial Sequence:  Enzymatic Nucleic Acid
accguuccggugcugaa

SEQ ID NO: 2275 - RNA, 17 nt, Artificial Sequence
  Description of Artificial Sequence:  Enzymatic Nucleic Acid
ccggugcugaaggccca

SEQ ID NO: 2276 - RNA, 17 nt, Artificial Sequence
  Description of Artificial Sequence:  Enzymatic Nucleic Acid
gugcugaaggcccaggc

SEQ ID NO: 2277 - RNA, 17 nt, Artificial Sequence
  Description of Artificial Sequence:  Enzymatic Nucleic Acid
aaggcccaggcggauau

SEQ ID NO: 2278 - RNA, 17 nt, Artificial Sequence
  Description of Artificial Sequence:  Enzymatic Nucleic Acid
gcccaggcggauaucua

SEQ ID NO: 2279 - RNA, 17 nt, Artificial Sequence
  Description of Artificial Sequence:  Enzymatic Nucleic Acid
cccaggcggauaucuac

SEQ ID NO: 2280 - RNA, 17 nt, Artificial Sequence
  Description of Artificial Sequence:  Enzymatic Nucleic Acid
aucuacaaggcggacuu

SEQ ID NO: 2281 - RNA, 17 nt, Artificial Sequence
  Description of Artificial Sequence:  Enzymatic Nucleic Acid
uacaaggcggacuucca

SEQ ID NO: 2282 - RNA, 17 nt, Artificial Sequence
  Description of Artificial Sequence:  Enzymatic Nucleic Acid
acaaggcggacuuccag

SEQ ID NO: 2283 - RNA, 17 nt, Artificial Sequence
  Description of Artificial Sequence:  Enzymatic Nucleic Acid
gacuuccaggcugagag

SEQ ID NO: 2284 - RNA, 17 nt, Artificial Sequence
  Description of Artificial Sequence:  Enzymatic Nucleic Acid
uccaggcugagaggcag

SEQ ID NO: 2285 - RNA, 17 nt, Artificial Sequence
  Description of Artificial Sequence:  Enzymatic Nucleic Acid
caggcugagaggcaggc

SEQ ID NO: 2286 - RNA, 17 nt, Artificial Sequence
  Description of Artificial Sequence:  Enzymatic Nucleic Acid
ggcugagaggcaggccc

SEQ ID NO: 2287 - RNA, 17 nt, Artificial Sequence
  Description of Artificial Sequence:  Enzymatic Nucleic Acid
gagaggcaggcccggga

SEQ ID NO: 2288 - RNA, 17 nt, Artificial Sequence
  Description of Artificial Sequence:  Enzymatic Nucleic Acid
gcaggcccgggagaagc

SEQ ID NO: 2289 - RNA, 17 nt, Artificial Sequence
  Description of Artificial Sequence:  Enzymatic Nucleic Acid
caggcccgggagaagcu

SEQ ID NO: 2290 - RNA, 17 nt, Artificial Sequence
  Description of Artificial Sequence:  Enzymatic Nucleic Acid
aggcccgggagaagcug

SEQ ID NO: 2291 - RNA, 17 nt, Artificial Sequence
  Description of Artificial Sequence:  Enzymatic Nucleic Acid
gcccgggagaagcuggc

SEQ ID NO: 2292 - RNA, 17 nt, Artificial Sequence
  Description of Artificial Sequence:  Enzymatic Nucleic Acid
gagaagcuggccgagaa

SEQ ID NO: 2293 - RNA, 17 nt, Artificial Sequence
  Description of Artificial Sequence:  Enzymatic Nucleic Acid
agcuggccgagaagaag

SEQ ID NO: 2294 - RNA, 17 nt, Artificial Sequence
  Description of Artificial Sequence:  Enzymatic Nucleic Acid
cuggccgagaagaagga

SEQ ID NO: 2295 - RNA, 17 nt, Artificial Sequence
  Description of Artificial Sequence:  Enzymatic Nucleic Acid
gccgagaagaaggagcu

SEQ ID NO: 2296 - RNA, 17 nt, Artificial Sequence
  Description of Artificial Sequence:  Enzymatic Nucleic Acid
gagaagaaggagcuccu

SEQ ID NO: 2297 - RNA, 17 nt, Artificial Sequence
  Description of Artificial Sequence:  Enzymatic Nucleic Acid
agaagaaggagcuccug

SEQ ID NO: 2298 - RNA, 17 nt, Artificial Sequence
  Description of Artificial Sequence:  Enzymatic Nucleic Acid
cuccugcaggagcagcu

SEQ ID NO: 2299 - RNA, 17 nt, Artificial Sequence
  Description of Artificial Sequence:  Enzymatic Nucleic Acid
uccugcaggagcagcug

SEQ ID NO: 2300 - RNA, 17 nt, Artificial Sequence
  Description of Artificial Sequence:  Enzymatic Nucleic Acid
gagcagcuggagcagcu

SEQ ID NO: 2301 - RNA, 17 nt, Artificial Sequence
  Description of Artificial Sequence:  Enzymatic Nucleic Acid
agcagcuggagcagcug

SEQ ID NO: 2302 - RNA, 17 nt, Artificial Sequence
  Description of Artificial Sequence:  Enzymatic Nucleic Acid
cagcugcagagggagua

SEQ ID NO: 2303 - RNA, 17 nt, Artificial Sequence
  Description of Artificial Sequence:  Enzymatic Nucleic Acid
gcugcagagggaguaca

SEQ ID NO: 2304 - RNA, 17 nt, Artificial Sequence
  Description of Artificial Sequence:  Enzymatic Nucleic Acid
cugcagagggaguacag

SEQ ID NO: 2305 - RNA, 17 nt, Artificial Sequence
  Description of Artificial Sequence:  Enzymatic Nucleic Acid
ugcagagggaguacagc

SEQ ID NO: 2306 - RNA, 17 nt, Artificial Sequence
  Description of Artificial Sequence:  Enzymatic Nucleic Acid
agcaaacugaaggccag

SEQ ID NO: 2307 - RNA, 17 nt, Artificial Sequence
  Description of Artificial Sequence:  Enzymatic Nucleic Acid
aaacugaaggccagcug

SEQ ID NO: 2308 - RNA, 17 nt, Artificial Sequence
  Description of Artificial Sequence:  Enzymatic Nucleic Acid
agcugucaggagucggc

SEQ ID NO: 2309 - RNA, 17 nt, Artificial Sequence
  Description of Artificial Sequence:  Enzymatic Nucleic Acid
gcugucaggagucggcc

SEQ ID NO: 2310 - RNA, 17 nt, Artificial Sequence
  Description of Artificial Sequence:  Enzymatic Nucleic Acid
caggagucggccaggau

SEQ ID NO: 2311 - RNA, 17 nt, Artificial Sequence
  Description of Artificial Sequence:  Enzymatic Nucleic Acid
gucggccaggaucgagg

SEQ ID NO: 2312 - RNA, 17 nt, Artificial Sequence
  Description of Artificial Sequence:  Enzymatic Nucleic Acid
ucggccaggaucgagga

SEQ ID NO: 2313 - RNA, 17 nt, Artificial Sequence
  Description of Artificial Sequence:  Enzymatic Nucleic Acid
ccaggaucgaggacaug

SEQ ID NO: 2314 - RNA, 17 nt, Artificial Sequence
  Description of Artificial Sequence:  Enzymatic Nucleic Acid
aggaucgaggacaugag

SEQ ID NO: 2315 - RNA, 17 nt, Artificial Sequence
  Description of Artificial Sequence:  Enzymatic Nucleic Acid
ggaucgaggacaugagg

SEQ ID NO: 2316 - RNA, 17 nt, Artificial Sequence
  Description of Artificial Sequence:  Enzymatic Nucleic Acid
gaggacaugaggaagcg

SEQ ID NO: 2317 - RNA, 17 nt, Artificial Sequence
  Description of Artificial Sequence:  Enzymatic Nucleic Acid
ggacaugaggaagcggc

SEQ ID NO: 2318 - RNA, 17 nt, Artificial Sequence
  Description of Artificial Sequence:  Enzymatic Nucleic Acid
gacaugaggaagcggca

SEQ ID NO: 2319 - RNA, 17 nt, Artificial Sequence
  Description of Artificial Sequence:  Enzymatic Nucleic Acid
gaggaagcggcaugucg

SEQ ID NO: 2320 - RNA, 17 nt, Artificial Sequence
  Description of Artificial Sequence:  Enzymatic Nucleic Acid
ggcaugucgaggucucc

SEQ ID NO: 2321 - RNA, 17 nt, Artificial Sequence
  Description of Artificial Sequence:  Enzymatic Nucleic Acid
caugucgaggucuccca

SEQ ID NO: 2322 - RNA, 17 nt, Artificial Sequence
  Description of Artificial Sequence:  Enzymatic Nucleic Acid
gucucccaggcccccuu

SEQ ID NO: 2323 - RNA, 17 nt, Artificial Sequence
  Description of Artificial Sequence:  Enzymatic Nucleic Acid
ucuccccuggcccugcc

SEQ ID NO: 2324 - RNA, 17 nt, Artificial Sequence
  Description of Artificial Sequence:  Enzymatic Nucleic Acid
cccagccagaggaggag

SEQ ID NO: 2325 - RNA, 17 nt, Artificial Sequence
  Description of Artificial Sequence:  Enzymatic Nucleic Acid
cagccagaggaggagcc

SEQ ID NO: 2326 - RNA, 17 nt, Artificial Sequence
  Description of Artificial Sequence:  Enzymatic Nucleic Acid
agccagaggaggagccc

SEQ ID NO: 2327 - RNA, 17 nt, Artificial Sequence
  Description of Artificial Sequence:  Enzymatic Nucleic Acid
ccagaggaggagccccc

SEQ ID NO: 2328 - RNA, 17 nt, Artificial Sequence
  Description of Artificial Sequence:  Enzymatic Nucleic Acid
cagaggaggagcccccc

SEQ ID NO: 2329 - RNA, 17 nt, Artificial Sequence
  Description of Artificial Sequence:  Enzymatic Nucleic Acid
gcccccccgaggagcca

SEQ ID NO: 2330 - RNA, 17 nt, Artificial Sequence
  Description of Artificial Sequence:  Enzymatic Nucleic Acid
ccccccgaggagccacc

SEQ ID NO: 2331 - RNA, 17 nt, Artificial Sequence
  Description of Artificial Sequence:  Enzymatic Nucleic Acid
cccccgaggagccaccu

SEQ ID NO: 2332 - RNA, 17 nt, Artificial Sequence
  Description of Artificial Sequence:  Enzymatic Nucleic Acid
agccaccugacuucugc

SEQ ID NO: 2333 - RNA, 17 nt, Artificial Sequence
  Description of Artificial Sequence:  Enzymatic Nucleic Acid
caguaucaggccccuga

SEQ ID NO: 2334 - RNA, 17 nt, Artificial Sequence
  Description of Artificial Sequence:  Enzymatic Nucleic Acid
aggccccugauauggac

SEQ ID NO: 2335 - RNA, 17 nt, Artificial Sequence
  Description of Artificial Sequence:  Enzymatic Nucleic Acid
ccugauauggacacccu

SEQ ID NO: 2336 - RNA, 17 nt, Artificial Sequence
  Description of Artificial Sequence:  Enzymatic Nucleic Acid
cugauauggacacccug

SEQ ID NO: 2337 - RNA, 17 nt, Artificial Sequence
  Description of Artificial Sequence:  Enzymatic Nucleic Acid
acccugcagauacaugu

SEQ ID NO: 2338 - RNA, 17 nt, Artificial Sequence
  Description of Artificial Sequence:  Enzymatic Nucleic Acid
caugucauggagugcau

SEQ ID NO: 2339 - RNA, 17 nt, Artificial Sequence
  Description of Artificial Sequence:  Enzymatic Nucleic Acid
augucauggagugcauu

SEQ ID NO: 2340 - RNA, 17 nt, Artificial Sequence
  Description of Artificial Sequence:  Enzymatic Nucleic Acid
agugcauugaguagggc

SEQ ID NO: 2341 - RNA, 17 nt, Artificial Sequence
  Description of Artificial Sequence:  Enzymatic Nucleic Acid
auugaguagggccggcc

SEQ ID NO: 2342 - RNA, 17 nt, Artificial Sequence
  Description of Artificial Sequence:  Enzymatic Nucleic Acid
uugaguagggccggcca

SEQ ID NO: 2343 - RNA, 17 nt, Artificial Sequence
  Description of Artificial Sequence:  Enzymatic Nucleic Acid
guagggccggccagugc

SEQ ID NO: 2344 - RNA, 17 nt, Artificial Sequence
  Description of Artificial Sequence:  Enzymatic Nucleic Acid
cagugcaaggccacugc

SEQ ID NO: 2345 - RNA, 17 nt, Artificial Sequence
  Description of Artificial Sequence:  Enzymatic Nucleic Acid
gccugcccgaggacgug

SEQ ID NO: 2346 - RNA, 17 nt, Artificial Sequence
  Description of Artificial Sequence:  Enzymatic Nucleic Acid
cugcccgaggacgugcc

SEQ ID NO: 2347 - RNA, 17 nt, Artificial Sequence
  Description of Artificial Sequence:  Enzymatic Nucleic Acid
ugcccgaggacgugccc

SEQ ID NO: 2348 - RNA, 17 nt, Artificial Sequence
  Description of Artificial Sequence:  Enzymatic Nucleic Acid
acgugcccgggaccgug

SEQ ID NO: 2349 - RNA, 17 nt, Artificial Sequence
  Description of Artificial Sequence:  Enzymatic Nucleic Acid
cgugcccgggaccgugc

SEQ ID NO: 2350 - RNA, 17 nt, Artificial Sequence
  Description of Artificial Sequence:  Enzymatic Nucleic Acid
gugcccgggaccgugca

SEQ ID NO: 2351 - RNA, 17 nt, Artificial Sequence
  Description of Artificial Sequence:  Enzymatic Nucleic Acid
cuagcccaggaugaagg

SEQ ID NO: 2352 - RNA, 17 nt, Artificial Sequence
  Description of Artificial Sequence:  Enzymatic Nucleic Acid
uagcccaggaugaaggg

SEQ ID NO: 2353 - RNA, 17 nt, Artificial Sequence
  Description of Artificial Sequence:  Enzymatic Nucleic Acid
cccaggaugaagggcug

SEQ ID NO: 2354 - RNA, 17 nt, Artificial Sequence
  Description of Artificial Sequence:  Enzymatic Nucleic Acid
aggaugaagggcugggu

SEQ ID NO: 2355 - RNA, 17 nt, Artificial Sequence
  Description of Artificial Sequence:  Enzymatic Nucleic Acid
ggaugaagggcugggug

SEQ ID NO: 2356 - RNA, 17 nt, Artificial Sequence
  Description of Artificial Sequence:  Enzymatic Nucleic Acid
gaagggcuggguggcca

SEQ ID NO: 2357 - RNA, 17 nt, Artificial Sequence
  Description of Artificial Sequence:  Enzymatic Nucleic Acid
aagggcuggguggccac

SEQ ID NO: 2358 - RNA, 17 nt, Artificial Sequence
  Description of Artificial Sequence:  Enzymatic Nucleic Acid
ggcuggguggccacaac

SEQ ID NO: 2359 - RNA, 17 nt, Artificial Sequence
  Description of Artificial Sequence:  Enzymatic Nucleic Acid
ccacaacugggaugcca

SEQ ID NO: 2360 - RNA, 17 nt, Artificial Sequence
  Description of Artificial Sequence:  Enzymatic Nucleic Acid
cacaacugggaugccac

SEQ ID NO: 2361 - RNA, 17 nt, Artificial Sequence
  Description of Artificial Sequence:  Enzymatic Nucleic Acid
acaacugggaugccacc

SEQ ID NO: 2362 - RNA, 17 nt, Artificial Sequence
  Description of Artificial Sequence:  Enzymatic Nucleic Acid
ugccaccuggagcccca

SEQ ID NO: 2363 - RNA, 17 nt, Artificial Sequence
  Description of Artificial Sequence:  Enzymatic Nucleic Acid
gccaccuggagccccac

SEQ ID NO: 2364 - RNA, 17 nt, Artificial Sequence
  Description of Artificial Sequence:  Enzymatic Nucleic Acid
cccacccaggagcuggc

SEQ ID NO: 2365 - RNA, 17 nt, Artificial Sequence
  Description of Artificial Sequence:  Enzymatic Nucleic Acid
ccacccaggagcuggcc

SEQ ID NO: 2366 - RNA, 17 nt, Artificial Sequence
  Description of Artificial Sequence:  Enzymatic Nucleic Acid
caggagcuggccgcggc

SEQ ID NO: 2367 - RNA, 17 nt, Artificial Sequence
  Description of Artificial Sequence:  Enzymatic Nucleic Acid
cuggccgcggcaccuua

SEQ ID NO: 2368 - RNA, 17 nt, Artificial Sequence
  Description of Artificial Sequence:  Enzymatic Nucleic Acid
cagcuguugauccgcug

SEQ ID NO: 2369 - RNA, 17 nt, Artificial Sequence
  Description of Artificial Sequence:  Enzymatic Nucleic Acid
gauccgcugguccccuc

SEQ ID NO: 2370 - RNA, 17 nt, Artificial Sequence
  Description of Artificial Sequence:  Enzymatic Nucleic Acid
ccucuuuugggguagau

SEQ ID NO: 2371 - RNA, 17 nt, Artificial Sequence
  Description of Artificial Sequence:  Enzymatic Nucleic Acid
cucuuuugggguagaug

SEQ ID NO: 2372 - RNA, 17 nt, Artificial Sequence
  Description of Artificial Sequence:  Enzymatic Nucleic Acid
ucuuuugggguagaugc

SEQ ID NO: 2373 - RNA, 17 nt, Artificial Sequence
  Description of Artificial Sequence:  Enzymatic Nucleic Acid
uugggguagaugcggcc

SEQ ID NO: 2374 - RNA, 17 nt, Artificial Sequence
  Description of Artificial Sequence:  Enzymatic Nucleic Acid
guagaugcggccccgau

SEQ ID NO: 2375 - RNA, 17 nt, Artificial Sequence
  Description of Artificial Sequence:  Enzymatic Nucleic Acid
gcggccccgaucaggcc

SEQ ID NO: 2376 - RNA, 17 nt, Artificial Sequence
  Description of Artificial Sequence:  Enzymatic Nucleic Acid
cccgaucaggccugacu

SEQ ID NO: 2377 - RNA, 17 nt, Artificial Sequence
  Description of Artificial Sequence:  Enzymatic Nucleic Acid
ucaggccugacucgcug

SEQ ID NO: 2378 - RNA, 17 nt, Artificial Sequence
  Description of Artificial Sequence:  Enzymatic Nucleic Acid
gucugcucgaaccacuu

SEQ ID NO: 2379 - RNA, 17 nt, Artificial Sequence
  Description of Artificial Sequence:  Enzymatic Nucleic Acid
cuugccucgggcuaauc

SEQ ID NO: 2380 - RNA, 17 nt, Artificial Sequence
  Description of Artificial Sequence:  Enzymatic Nucleic Acid
uugccucgggcuaaucc

SEQ ID NO: 2381 - RNA, 17 nt, Artificial Sequence
  Description of Artificial Sequence:  Enzymatic Nucleic Acid
cuccacccggcacuggg

SEQ ID NO: 2382 - RNA, 17 nt, Artificial Sequence
  Description of Artificial Sequence:  Enzymatic Nucleic Acid
ccggcacuggggaaguc

SEQ ID NO: 2383 - RNA, 17 nt, Artificial Sequence
  Description of Artificial Sequence:  Enzymatic Nucleic Acid
cggcacuggggaaguca

SEQ ID NO: 2384 - RNA, 17 nt, Artificial Sequence
  Description of Artificial Sequence:  Enzymatic Nucleic Acid
ggcacuggggaagucaa

SEQ ID NO: 2385 - RNA, 17 nt, Artificial Sequence
  Description of Artificial Sequence:  Enzymatic Nucleic Acid
gcacuggggaagucaag

SEQ ID NO: 2386 - RNA, 17 nt, Artificial Sequence
  Description of Artificial Sequence:  Enzymatic Nucleic Acid
gaagucaagaauggggc

SEQ ID NO: 2387 - RNA, 17 nt, Artificial Sequence
  Description of Artificial Sequence:  Enzymatic Nucleic Acid
ucaagaauggggccugg

SEQ ID NO: 2388 - RNA, 17 nt, Artificial Sequence
  Description of Artificial Sequence:  Enzymatic Nucleic Acid
caagaauggggccuggg

SEQ ID NO: 2389 - RNA, 17 nt, Artificial Sequence
  Description of Artificial Sequence:  Enzymatic Nucleic Acid
aagaauggggccugggg

SEQ ID NO: 2390 - RNA, 17 nt, Artificial Sequence
  Description of Artificial Sequence:  Enzymatic Nucleic Acid
uggggccuggggcucuc

SEQ ID NO: 2391 - RNA, 17 nt, Artificial Sequence
  Description of Artificial Sequence:  Enzymatic Nucleic Acid
ggggccuggggcucuca

SEQ ID NO: 2392 - RNA, 17 nt, Artificial Sequence
  Description of Artificial Sequence:  Enzymatic Nucleic Acid
gggccuggggcucucag

SEQ ID NO: 2393 - RNA, 17 nt, Artificial Sequence
  Description of Artificial Sequence:  Enzymatic Nucleic Acid
ggcucucagggagaacu

SEQ ID NO: 2394 - RNA, 17 nt, Artificial Sequence
  Description of Artificial Sequence:  Enzymatic Nucleic Acid
gcucucagggagaacug

SEQ ID NO: 2395 - RNA, 17 nt, Artificial Sequence
  Description of Artificial Sequence:  Enzymatic Nucleic Acid
cucucagggagaacugc

SEQ ID NO: 2396 - RNA, 17 nt, Artificial Sequence
  Description of Artificial Sequence:  Enzymatic Nucleic Acid
cucagggagaacugcuu

SEQ ID NO: 2397 - RNA, 17 nt, Artificial Sequence
  Description of Artificial Sequence:  Enzymatic Nucleic Acid
cuuccccuggcagagcu

SEQ ID NO: 2398 - RNA, 17 nt, Artificial Sequence
  Description of Artificial Sequence:  Enzymatic Nucleic Acid
cccuggcagagcugggu

SEQ ID NO: 2399 - RNA, 17 nt, Artificial Sequence
  Description of Artificial Sequence:  Enzymatic Nucleic Acid
gcagagcuggguggcag

SEQ ID NO: 2400 - RNA, 17 nt, Artificial Sequence
  Description of Artificial Sequence:  Enzymatic Nucleic Acid
cagagcuggguggcagc

SEQ ID NO: 2401 - RNA, 17 nt, Artificial Sequence
  Description of Artificial Sequence:  Enzymatic Nucleic Acid
agcuggguggcagcucu

SEQ ID NO: 2402 - RNA, 17 nt, Artificial Sequence
  Description of Artificial Sequence:  Enzymatic Nucleic Acid
cucccaccggacaccga

SEQ ID NO: 2403 - RNA, 17 nt, Artificial Sequence
  Description of Artificial Sequence:  Enzymatic Nucleic Acid
ucccaccggacaccgac

SEQ ID NO: 2404 - RNA, 17 nt, Artificial Sequence
  Description of Artificial Sequence:  Enzymatic Nucleic Acid
cggacaccgacccgccc

SEQ ID NO: 2405 - RNA, 17 nt, Artificial Sequence
  Description of Artificial Sequence:  Enzymatic Nucleic Acid
ugugcccugggagugcu

SEQ ID NO: 2406 - RNA, 17 nt, Artificial Sequence
  Description of Artificial Sequence:  Enzymatic Nucleic Acid
gugcccugggagugcug

SEQ ID NO: 2407 - RNA, 17 nt, Artificial Sequence
  Description of Artificial Sequence:  Enzymatic Nucleic Acid
ugcccugggagugcugc

SEQ ID NO: 2408 - RNA, 17 nt, Artificial Sequence
  Description of Artificial Sequence:  Enzymatic Nucleic Acid
augcacacgggugcucu

SEQ ID NO: 2409 - RNA, 17 nt, Artificial Sequence
  Description of Artificial Sequence:  Enzymatic Nucleic Acid
ugcacacgggugcucuc

SEQ ID NO: 2410 - RNA, 17 nt, Artificial Sequence
  Description of Artificial Sequence:  Enzymatic Nucleic Acid
cuccuuuugggcugcau

SEQ ID NO: 2411 - RNA, 17 nt, Artificial Sequence
  Description of Artificial Sequence:  Enzymatic Nucleic Acid
uccuuuugggcugcaug

SEQ ID NO: 2412 - RNA, 17 nt, Artificial Sequence
  Description of Artificial Sequence:  Enzymatic Nucleic Acid
ugcagccagaccgaugu

SEQ ID NO: 2413 - RNA, 17 nt, Artificial Sequence
  Description of Artificial Sequence:  Enzymatic Nucleic Acid
gccagaccgauguguau

SEQ ID NO: 2414 - RNA, 17 nt, Artificial Sequence
  Description of Artificial Sequence:  Enzymatic Nucleic Acid
ucacuauugauggacau

SEQ ID NO: 2415 - RNA, 17 nt, Artificial Sequence
  Description of Artificial Sequence:  Enzymatic Nucleic Acid
cuauugauggacauuug

SEQ ID NO: 2416 - RNA, 17 nt, Artificial Sequence
  Description of Artificial Sequence:  Enzymatic Nucleic Acid
uauugauggacauuugg

SEQ ID NO: 2417 - RNA, 17 nt, Artificial Sequence
  Description of Artificial Sequence:  Enzymatic Nucleic Acid
ggacauuuggguuguuu

SEQ ID NO: 2418 - RNA, 17 nt, Artificial Sequence
  Description of Artificial Sequence:  Enzymatic Nucleic Acid
gacauuuggguuguuuc

SEQ ID NO: 2419 - RNA, 17 nt, Artificial Sequence
  Description of Artificial Sequence:  Enzymatic Nucleic Acid
uaaauaauggcauagua

SEQ ID NO: 2420 - RNA, 17 nt, Artificial Sequence
  Description of Artificial Sequence:  Enzymatic Nucleic Acid
ggcgcaguuugcucaua

SEQ ID NO: 2421 - RNA, 17 nt, Artificial Sequence
  Description of Artificial Sequence:  Enzymatic Nucleic Acid
gcgcaguuugcucauac

SEQ ID NO: 2422 - RNA, 17 nt, Artificial Sequence
  Description of Artificial Sequence:  Enzymatic Nucleic Acid
aguuugcucauacuuug

SEQ ID NO: 2423 - RNA, 17 nt, Artificial Sequence
  Description of Artificial Sequence:  Enzymatic Nucleic Acid
uugcucauacuuuguga

SEQ ID NO: 2424 - RNA, 17 nt, Artificial Sequence
  Description of Artificial Sequence:  Enzymatic Nucleic Acid
cucauacuuugugacuu

SEQ ID NO: 2425 - RNA, 17 nt, Artificial Sequence
  Description of Artificial Sequence:  Enzymatic Nucleic Acid
ucauacuuugugacuug

SEQ ID NO: 2426 - RNA, 17 nt, Artificial Sequence
  Description of Artificial Sequence:  Enzymatic Nucleic Acid
uugugacuugcggucac

SEQ ID NO: 2427 - RNA, 17 nt, Artificial Sequence
  Description of Artificial Sequence:  Enzymatic Nucleic Acid
cuugcggucacaguggc

SEQ ID NO: 2428 - RNA, 17 nt, Artificial Sequence
  Description of Artificial Sequence:  Enzymatic Nucleic Acid
aguggcauucagcucca

SEQ ID NO: 2429 - RNA, 17 nt, Artificial Sequence
  Description of Artificial Sequence:  Enzymatic Nucleic Acid
guggcauucagcuccac

SEQ ID NO: 2430 - RNA, 17 nt, Artificial Sequence
  Description of Artificial Sequence:  Enzymatic Nucleic Acid
auucagcuccacacuug

SEQ ID NO: 2431 - RNA, 17 nt, Artificial Sequence
  Description of Artificial Sequence:  Enzymatic Nucleic Acid
uccacacuugguagaac

SEQ ID NO: 2432 - RNA, 17 nt, Artificial Sequence
  Description of Artificial Sequence:  Enzymatic Nucleic Acid
cacuugguagaaccaca

SEQ ID NO: 2433 - RNA, 17 nt, Artificial Sequence
  Description of Artificial Sequence:  Enzymatic Nucleic Acid
acaagcauagaaacauc

SEQ ID NO: 2434 - RNA, 17 nt, Artificial Sequence
  Description of Artificial Sequence:  Enzymatic Nucleic Acid
agaaacauccuaaacaa

SEQ ID NO: 2435 - RNA, 17 nt, Artificial Sequence
  Description of Artificial Sequence:  Enzymatic Nucleic Acid
aacauccuaaacaaucu

SEQ ID NO: 2436 - RNA, 17 nt, Artificial Sequence
  Description of Artificial Sequence:  Enzymatic Nucleic Acid
uaaacaaucuucaucga

SEQ ID NO: 2437 - RNA, 17 nt, Artificial Sequence
  Description of Artificial Sequence:  Enzymatic Nucleic Acid
aacaaucuucaucgagg

SEQ ID NO: 2438 - RNA, 17 nt, Artificial Sequence
  Description of Artificial Sequence:  Enzymatic Nucleic Acid
acaaucuucaucgaggc

SEQ ID NO: 2439 - RNA, 17 nt, Artificial Sequence
  Description of Artificial Sequence:  Enzymatic Nucleic Acid
aucuucaucgaggcauc

SEQ ID NO: 2440 - RNA, 17 nt, Artificial Sequence
  Description of Artificial Sequence:  Enzymatic Nucleic Acid
cgaggcaucgaggucca

SEQ ID NO: 2441 - RNA, 17 nt, Artificial Sequence
  Description of Artificial Sequence:  Enzymatic Nucleic Acid
aucgagguccaucccaa

SEQ ID NO: 2442 - RNA, 17 nt, Artificial Sequence
  Description of Artificial Sequence:  Enzymatic Nucleic Acid
agguccaucccaauaaa

SEQ ID NO: 2443 - RNA, 17 nt, Artificial Sequence
  Description of Artificial Sequence:  Enzymatic Nucleic Acid
aucccaauaaaaaucag

SEQ ID NO: 2444 - RNA, 17 nt, Artificial Sequence
  Description of Artificial Sequence:  Enzymatic Nucleic Acid
auaaaaaucaggagacc

SEQ ID NO: 2445 - RNA, 17 nt, Artificial Sequence
  Description of Artificial Sequence:  Enzymatic Nucleic Acid
cccuggcuaucauagac

SEQ ID NO: 2446 - RNA, 17 nt, Artificial Sequence
  Description of Artificial Sequence:  Enzymatic Nucleic Acid
cuggcuaucauagaccu

SEQ ID NO: 2447 - RNA, 17 nt, Artificial Sequence
  Description of Artificial Sequence:  Enzymatic Nucleic Acid
gcuaucauagaccuuag

SEQ ID NO: 2448 - RNA, 17 nt, Artificial Sequence
  Description of Artificial Sequence:  Enzymatic Nucleic Acid
auagaccuuagucuucg

SEQ ID NO: 2449 - RNA, 17 nt, Artificial Sequence
  Description of Artificial Sequence:  Enzymatic Nucleic Acid
uagaccuuagucuucgc

SEQ ID NO: 2450 - RNA, 17 nt, Artificial Sequence
  Description of Artificial Sequence:  Enzymatic Nucleic Acid
accuuagucuucgcugg

SEQ ID NO: 2451 - RNA, 17 nt, Artificial Sequence
  Description of Artificial Sequence:  Enzymatic Nucleic Acid
cuuagucuucgcuggua

SEQ ID NO: 2452 - RNA, 17 nt, Artificial Sequence
  Description of Artificial Sequence:  Enzymatic Nucleic Acid
uuagucuucgcugguau

SEQ ID NO: 2453 - RNA, 17 nt, Artificial Sequence
  Description of Artificial Sequence:  Enzymatic Nucleic Acid
ucgcugguauacucgcu

SEQ ID NO: 2454 - RNA, 17 nt, Artificial Sequence
  Description of Artificial Sequence:  Enzymatic Nucleic Acid
gcugguauacucgcugu

SEQ ID NO: 2455 - RNA, 17 nt, Artificial Sequence
  Description of Artificial Sequence:  Enzymatic Nucleic Acid
gguauacucgcugucug

SEQ ID NO: 2456 - RNA, 17 nt, Artificial Sequence
  Description of Artificial Sequence:  Enzymatic Nucleic Acid
cucgcugucugucaacc

SEQ ID NO: 2457 - RNA, 17 nt, Artificial Sequence
  Description of Artificial Sequence:  Enzymatic Nucleic Acid
cugucugucaaccagcg

SEQ ID NO: 2458 - RNA, 17 nt, Artificial Sequence
  Description of Artificial Sequence:  Enzymatic Nucleic Acid
ccagcgguugacuuuuu

SEQ ID NO: 2459 - RNA, 17 nt, Artificial Sequence
  Description of Artificial Sequence:  Enzymatic Nucleic Acid
gguugacuuuuuuuaag

SEQ ID NO: 2460 - RNA, 17 nt, Artificial Sequence
  Description of Artificial Sequence:  Enzymatic Nucleic Acid
guugacuuuuuuuaagc

SEQ ID NO: 2461 - RNA, 17 nt, Artificial Sequence
  Description of Artificial Sequence:  Enzymatic Nucleic Acid
uugacuuuuuuuaagcc

SEQ ID NO: 2462 - RNA, 17 nt, Artificial Sequence
  Description of Artificial Sequence:  Enzymatic Nucleic Acid
ugacuuuuuuuaagccu

SEQ ID NO: 2463 - RNA, 17 nt, Artificial Sequence
  Description of Artificial Sequence:  Enzymatic Nucleic Acid
gacuuuuuuuaagccuu

SEQ ID NO: 2464 - RNA, 17 nt, Artificial Sequence
  Description of Artificial Sequence:  Enzymatic Nucleic Acid
acuuuuuuuaagccuuc

SEQ ID NO: 2465 - RNA, 17 nt, Artificial Sequence
  Description of Artificial Sequence:  Enzymatic Nucleic Acid
cuuuuuuuaagccuucu

SEQ ID NO: 2466 - RNA, 17 nt, Artificial Sequence
  Description of Artificial Sequence:  Enzymatic Nucleic Acid
uuaagccuucuuuuuuc

SEQ ID NO: 2467 - RNA, 17 nt, Artificial Sequence
  Description of Artificial Sequence:  Enzymatic Nucleic Acid
uaagccuucuuuuuucu

SEQ ID NO: 2468 - RNA, 17 nt, Artificial Sequence
  Description of Artificial Sequence:  Enzymatic Nucleic Acid
agccuucuuuuuucucu

SEQ ID NO: 2469 - RNA, 17 nt, Artificial Sequence
  Description of Artificial Sequence:  Enzymatic Nucleic Acid
gccuucuuuuuucucuu

SEQ ID NO: 2470 - RNA, 17 nt, Artificial Sequence
  Description of Artificial Sequence:  Enzymatic Nucleic Acid
ccuucuuuuuucucuuu

SEQ ID NO: 2471 - RNA, 17 nt, Artificial Sequence
  Description of Artificial Sequence:  Enzymatic Nucleic Acid
cuucuuuuuucucuuuu

SEQ ID NO: 2472 - RNA, 17 nt, Artificial Sequence
  Description of Artificial Sequence:  Enzymatic Nucleic Acid
uucuuuuuucucuuuua

SEQ ID NO: 2473 - RNA, 17 nt, Artificial Sequence
  Description of Artificial Sequence:  Enzymatic Nucleic Acid
ucuuuuuucucuuuuac

SEQ ID NO: 2474 - RNA, 17 nt, Artificial Sequence
  Description of Artificial Sequence:  Enzymatic Nucleic Acid
uuuuuucucuuuuacca

SEQ ID NO: 2475 - RNA, 17 nt, Artificial Sequence
  Description of Artificial Sequence:  Enzymatic Nucleic Acid
uuuucucuuuuaccagu

SEQ ID NO: 2476 - RNA, 17 nt, Artificial Sequence
  Description of Artificial Sequence:  Enzymatic Nucleic Acid
uuucucuuuuaccaguu

SEQ ID NO: 2477 - RNA, 17 nt, Artificial Sequence
  Description of Artificial Sequence:  Enzymatic Nucleic Acid
uucucuuuuaccaguuu

SEQ ID NO: 2478 - RNA, 17 nt, Artificial Sequence
  Description of Artificial Sequence:  Enzymatic Nucleic Acid
ucucuuuuaccaguuuc

SEQ ID NO: 2479 - RNA, 17 nt, Artificial Sequence
  Description of Artificial Sequence:  Enzymatic Nucleic Acid
uuaccaguuucuggagc

SEQ ID NO: 2480 - RNA, 17 nt, Artificial Sequence
  Description of Artificial Sequence:  Enzymatic Nucleic Acid
uaccaguuucuggagca

SEQ ID NO: 2481 - RNA, 17 nt, Artificial Sequence
  Description of Artificial Sequence:  Enzymatic Nucleic Acid
accaguuucuggagcaa

SEQ ID NO: 2482 - RNA, 17 nt, Artificial Sequence
  Description of Artificial Sequence:  Enzymatic Nucleic Acid
gagcaaauucaguuugc

SEQ ID NO: 2483 - RNA, 17 nt, Artificial Sequence
  Description of Artificial Sequence:  Enzymatic Nucleic Acid
agcaaauucaguuugcc

SEQ ID NO: 2484 - RNA, 17 nt, Artificial Sequence
  Description of Artificial Sequence:  Enzymatic Nucleic Acid
aauucaguuugccuucc

SEQ ID NO: 2485 - RNA, 17 nt, Artificial Sequence
  Description of Artificial Sequence:  Enzymatic Nucleic Acid
auucaguuugccuuccu

SEQ ID NO: 2486 - RNA, 17 nt, Artificial Sequence
  Description of Artificial Sequence:  Enzymatic Nucleic Acid
guuugccuuccuggauu

SEQ ID NO: 2487 - RNA, 17 nt, Artificial Sequence
  Description of Artificial Sequence:  Enzymatic Nucleic Acid
uuugccuuccuggauuu

SEQ ID NO: 2488 - RNA, 17 nt, Artificial Sequence
  Description of Artificial Sequence:  Enzymatic Nucleic Acid
uccuggauuuguaaauu

SEQ ID NO: 2489 - RNA, 17 nt, Artificial Sequence
  Description of Artificial Sequence:  Enzymatic Nucleic Acid
ccuggauuuguaaauug

SEQ ID NO: 2490 - RNA, 17 nt, Artificial Sequence
  Description of Artificial Sequence:  Enzymatic Nucleic Acid
ggauuuguaaauuguaa

SEQ ID NO: 2491 - RNA, 17 nt, Artificial Sequence
  Description of Artificial Sequence:  Enzymatic Nucleic Acid
uuguaaauuguaaugac

SEQ ID NO: 2492 - RNA, 17 nt, Artificial Sequence
  Description of Artificial Sequence:  Enzymatic Nucleic Acid
uaaauuguaaugaccuc

SEQ ID NO: 2493 - RNA, 17 nt, Artificial Sequence
  Description of Artificial Sequence:  Enzymatic Nucleic Acid
aaugaccucaaaacuuu

SEQ ID NO: 2494 - RNA, 17 nt, Artificial Sequence
  Description of Artificial Sequence:  Enzymatic Nucleic Acid
ucaaaacuuuagcaguu

SEQ ID NO: 2495 - RNA, 17 nt, Artificial Sequence
  Description of Artificial Sequence:  Enzymatic Nucleic Acid
caaaacuuuagcaguuc

SEQ ID NO: 2496 - RNA, 17 nt, Artificial Sequence
  Description of Artificial Sequence:  Enzymatic Nucleic Acid
aaaacuuuagcaguucu

SEQ ID NO: 2497 - RNA, 17 nt, Artificial Sequence
  Description of Artificial Sequence:  Enzymatic Nucleic Acid
uuagcaguucuuccauc

SEQ ID NO: 2498 - RNA, 17 nt, Artificial Sequence
  Description of Artificial Sequence:  Enzymatic Nucleic Acid
uagcaguucuuccaucu

SEQ ID NO: 2499 - RNA, 17 nt, Artificial Sequence
  Description of Artificial Sequence:  Enzymatic Nucleic Acid
gcaguucuuccaucuga

SEQ ID NO: 2500 - RNA, 17 nt, Artificial Sequence
  Description of Artificial Sequence:  Enzymatic Nucleic Acid
caguucuuccaucugac

SEQ ID NO: 2501 - RNA, 17 nt, Artificial Sequence
  Description of Artificial Sequence:  Enzymatic Nucleic Acid
ucuuccaucugacucag

SEQ ID NO: 2502 - RNA, 17 nt, Artificial Sequence
  Description of Artificial Sequence:  Enzymatic Nucleic Acid
aucugacucagguuugc

SEQ ID NO: 2503 - RNA, 17 nt, Artificial Sequence
  Description of Artificial Sequence:  Enzymatic Nucleic Acid
acucagguuugcuucuc

SEQ ID NO: 2504 - RNA, 17 nt, Artificial Sequence
  Description of Artificial Sequence:  Enzymatic Nucleic Acid
cucagguuugcuucucu

SEQ ID NO: 2505 - RNA, 17 nt, Artificial Sequence
  Description of Artificial Sequence:  Enzymatic Nucleic Acid
gguuugcuucucuggcg

SEQ ID NO: 2506 - RNA, 17 nt, Artificial Sequence
  Description of Artificial Sequence:  Enzymatic Nucleic Acid
guuugcuucucuggcgg

SEQ ID NO: 2507 - RNA, 17 nt, Artificial Sequence
  Description of Artificial Sequence:  Enzymatic Nucleic Acid
uugcuucucuggcgguc

SEQ ID NO: 2508 - RNA, 17 nt, Artificial Sequence
  Description of Artificial Sequence:  Enzymatic Nucleic Acid
cuggcggucuucagaau

SEQ ID NO: 2509 - RNA, 17 nt, Artificial Sequence
  Description of Artificial Sequence:  Enzymatic Nucleic Acid
ggcggucuucagaauca

SEQ ID NO: 2510 - RNA, 17 nt, Artificial Sequence
  Description of Artificial Sequence:  Enzymatic Nucleic Acid
gcggucuucagaaucaa

SEQ ID NO: 2511 - RNA, 17 nt, Artificial Sequence
  Description of Artificial Sequence:  Enzymatic Nucleic Acid
uucagaaucaacaucca

SEQ ID NO: 2512 - RNA, 17 nt, Artificial Sequence
  Description of Artificial Sequence:  Enzymatic Nucleic Acid
aucaacauccacacuuc

SEQ ID NO: 2513 - RNA, 17 nt, Artificial Sequence
  Description of Artificial Sequence:  Enzymatic Nucleic Acid
uccacacuuccgugauu

SEQ ID NO: 2514 - RNA, 17 nt, Artificial Sequence
  Description of Artificial Sequence:  Enzymatic Nucleic Acid
ccacacuuccgugauua

SEQ ID NO: 2515 - RNA, 17 nt, Artificial Sequence
  Description of Artificial Sequence:  Enzymatic Nucleic Acid
uccgugauuaucugcgu

SEQ ID NO: 2516 - RNA, 17 nt, Artificial Sequence
  Description of Artificial Sequence:  Enzymatic Nucleic Acid
ccgugauuaucugcgug

SEQ ID NO: 2517 - RNA, 17 nt, Artificial Sequence
  Description of Artificial Sequence:  Enzymatic Nucleic Acid
gugauuaucugcgugca

SEQ ID NO: 2518 - RNA, 17 nt, Artificial Sequence
  Description of Artificial Sequence:  Enzymatic Nucleic Acid
gcgugcauuuuggacaa

SEQ ID NO: 2519 - RNA, 17 nt, Artificial Sequence
  Description of Artificial Sequence:  Enzymatic Nucleic Acid
cgugcauuuuggacaaa

SEQ ID NO: 2520 - RNA, 17 nt, Artificial Sequence
  Description of Artificial Sequence:  Enzymatic Nucleic Acid
gugcauuuuggacaaag

SEQ ID NO: 2521 - RNA, 17 nt, Artificial Sequence
  Description of Artificial Sequence:  Enzymatic Nucleic Acid
acaaagcuuccaaccag

SEQ ID NO: 2522 - RNA, 17 nt, Artificial Sequence
  Description of Artificial Sequence:  Enzymatic Nucleic Acid
caaagcuuccaaccagg

SEQ ID NO: 2523 - RNA, 17 nt, Artificial Sequence
  Description of Artificial Sequence:  Enzymatic Nucleic Acid
accaggauacgggaaga

SEQ ID NO: 2524 - RNA, 17 nt, Artificial Sequence
  Description of Artificial Sequence:  Enzymatic Nucleic Acid
cuggugaucuuucagca

SEQ ID NO: 2525 - RNA, 17 nt, Artificial Sequence
  Description of Artificial Sequence:  Enzymatic Nucleic Acid
ggugaucuuucagcagg

SEQ ID NO: 2526 - RNA, 17 nt, Artificial Sequence
  Description of Artificial Sequence:  Enzymatic Nucleic Acid
gugaucuuucagcaggu

SEQ ID NO: 2527 - RNA, 17 nt, Artificial Sequence
  Description of Artificial Sequence:  Enzymatic Nucleic Acid
ugaucuuucagcagguu

SEQ ID NO: 2528 - RNA, 17 nt, Artificial Sequence
  Description of Artificial Sequence:  Enzymatic Nucleic Acid
cagcagguuucuucaug

SEQ ID NO: 2529 - RNA, 17 nt, Artificial Sequence
  Description of Artificial Sequence:  Enzymatic Nucleic Acid
agcagguuucuucaugg

SEQ ID NO: 2530 - RNA, 17 nt, Artificial Sequence
  Description of Artificial Sequence:  Enzymatic Nucleic Acid
gcagguuucuucaugga

SEQ ID NO: 2531 - RNA, 17 nt, Artificial Sequence
  Description of Artificial Sequence:  Enzymatic Nucleic Acid
agguuucuucauggagg

SEQ ID NO: 2532 - RNA, 17 nt, Artificial Sequence
  Description of Artificial Sequence:  Enzymatic Nucleic Acid
gguuucuucauggagga

SEQ ID NO: 2533 - RNA, 17 nt, Artificial Sequence
  Description of Artificial Sequence:  Enzymatic Nucleic Acid
gaggaacuuaauacaua

SEQ ID NO: 2534 - RNA, 17 nt, Artificial Sequence
  Description of Artificial Sequence:  Enzymatic Nucleic Acid
aggaacuuaauacauac

SEQ ID NO: 2535 - RNA, 17 nt, Artificial Sequence
  Description of Artificial Sequence:  Enzymatic Nucleic Acid
aacuuaauacauaccgu

SEQ ID NO: 2536 - RNA, 17 nt, Artificial Sequence
  Description of Artificial Sequence:  Enzymatic Nucleic Acid
uaauacauaccgucaga

SEQ ID NO: 2537 - RNA, 17 nt, Artificial Sequence
  Description of Artificial Sequence:  Enzymatic Nucleic Acid
cauaccgucagaagcag

SEQ ID NO: 2538 - RNA, 17 nt, Artificial Sequence
  Description of Artificial Sequence:  Enzymatic Nucleic Acid
cagggaguaguacuuaa

SEQ ID NO: 2539 - RNA, 17 nt, Artificial Sequence
  Description of Artificial Sequence:  Enzymatic Nucleic Acid
ggaguaguacuuaaaua

SEQ ID NO: 2540 - RNA, 17 nt, Artificial Sequence
  Description of Artificial Sequence:  Enzymatic Nucleic Acid
guaguacuuaaauauca

SEQ ID NO: 2541 - RNA, 17 nt, Artificial Sequence
  Description of Artificial Sequence:  Enzymatic Nucleic Acid
uaguacuuaaauaucaa

SEQ ID NO: 2542 - RNA, 17 nt, Artificial Sequence
  Description of Artificial Sequence:  Enzymatic Nucleic Acid
acuuaaauaucaagaac

SEQ ID NO: 2543 - RNA, 17 nt, Artificial Sequence
  Description of Artificial Sequence:  Enzymatic Nucleic Acid
uuaaauaucaagaacug

SEQ ID NO: 2544 - RNA, 17 nt, Artificial Sequence
  Description of Artificial Sequence:  Enzymatic Nucleic Acid
aacugccuaauucagga

SEQ ID NO: 2545 - RNA, 17 nt, Artificial Sequence
  Description of Artificial Sequence:  Enzymatic Nucleic Acid
ugccuaauucaggaccu

SEQ ID NO: 2546 - RNA, 17 nt, Artificial Sequence
  Description of Artificial Sequence:  Enzymatic Nucleic Acid
gccuaauucaggaccuc

SEQ ID NO: 2547 - RNA, 17 nt, Artificial Sequence
  Description of Artificial Sequence:  Enzymatic Nucleic Acid
caggaccuccacaugau

SEQ ID NO: 2548 - RNA, 17 nt, Artificial Sequence
  Description of Artificial Sequence:  Enzymatic Nucleic Acid
cacaugauaggagguuu

SEQ ID NO: 2549 - RNA, 17 nt, Artificial Sequence
  Description of Artificial Sequence:  Enzymatic Nucleic Acid
uaggagguuuacauuuc

SEQ ID NO: 2550 - RNA, 17 nt, Artificial Sequence
  Description of Artificial Sequence:  Enzymatic Nucleic Acid
aggagguuuacauuuca

SEQ ID NO: 2551 - RNA, 17 nt, Artificial Sequence
  Description of Artificial Sequence:  Enzymatic Nucleic Acid
ggagguuuacauuucaa

SEQ ID NO: 2552 - RNA, 17 nt, Artificial Sequence
  Description of Artificial Sequence:  Enzymatic Nucleic Acid
guuuacauuucaaguua

SEQ ID NO: 2553 - RNA, 17 nt, Artificial Sequence
  Description of Artificial Sequence:  Enzymatic Nucleic Acid
uuuacauuucaaguuau

SEQ ID NO: 2554 - RNA, 17 nt, Artificial Sequence
  Description of Artificial Sequence:  Enzymatic Nucleic Acid
uuacauuucaaguuaua

SEQ ID NO: 2555 - RNA, 17 nt, Artificial Sequence
  Description of Artificial Sequence:  Enzymatic Nucleic Acid
uuucaaguuauaauaga

SEQ ID NO: 2556 - RNA, 17 nt, Artificial Sequence
  Description of Artificial Sequence:  Enzymatic Nucleic Acid
uucaaguuauaauagau

SEQ ID NO: 2557 - RNA, 17 nt, Artificial Sequence
  Description of Artificial Sequence:  Enzymatic Nucleic Acid
caaguuauaauagaugg

SEQ ID NO: 2558 - RNA, 17 nt, Artificial Sequence
  Description of Artificial Sequence:  Enzymatic Nucleic Acid
guuauaauagauggaag

SEQ ID NO: 2559 - RNA, 17 nt, Artificial Sequence
  Description of Artificial Sequence:  Enzymatic Nucleic Acid
aagagaauuuccagaag

SEQ ID NO: 2560 - RNA, 17 nt, Artificial Sequence
  Description of Artificial Sequence:  Enzymatic Nucleic Acid
agagaauuuccagaagg

SEQ ID NO: 2561 - RNA, 17 nt, Artificial Sequence
  Description of Artificial Sequence:  Enzymatic Nucleic Acid
gagaauuuccagaaggu

SEQ ID NO: 2562 - RNA, 17 nt, Artificial Sequence
  Description of Artificial Sequence:  Enzymatic Nucleic Acid
gugaagguagaucaaag

SEQ ID NO: 2563 - RNA, 17 nt, Artificial Sequence
  Description of Artificial Sequence:  Enzymatic Nucleic Acid
agguagaucaaagaagg

SEQ ID NO: 2564 - RNA, 17 nt, Artificial Sequence
  Description of Artificial Sequence:  Enzymatic Nucleic Acid
agccaaauuagcuguug

SEQ ID NO: 2565 - RNA, 17 nt, Artificial Sequence
  Description of Artificial Sequence:  Enzymatic Nucleic Acid
gccaaauuagcuguuga

SEQ ID NO: 2566 - RNA, 17 nt, Artificial Sequence
  Description of Artificial Sequence:  Enzymatic Nucleic Acid
uuagcuguugagauacu

SEQ ID NO: 2567 - RNA, 17 nt, Artificial Sequence
  Description of Artificial Sequence:  Enzymatic Nucleic Acid
guugagauacuuaauaa

SEQ ID NO: 2568 - RNA, 17 nt, Artificial Sequence
  Description of Artificial Sequence:  Enzymatic Nucleic Acid
gagauacuuaauaagga

SEQ ID NO: 2569 - RNA, 17 nt, Artificial Sequence
  Description of Artificial Sequence:  Enzymatic Nucleic Acid
agauacuuaauaaggaa

SEQ ID NO: 2570 - RNA, 17 nt, Artificial Sequence
  Description of Artificial Sequence:  Enzymatic Nucleic Acid
uacuuaauaaggaaaag

SEQ ID NO: 2571 - RNA, 17 nt, Artificial Sequence
  Description of Artificial Sequence:  Enzymatic Nucleic Acid
aaggcaguuaguccuuu

SEQ ID NO: 2572 - RNA, 17 nt, Artificial Sequence
  Description of Artificial Sequence:  Enzymatic Nucleic Acid
aggcaguuaguccuuua

SEQ ID NO: 2573 - RNA, 17 nt, Artificial Sequence
  Description of Artificial Sequence:  Enzymatic Nucleic Acid
caguuaguccuuuauua

SEQ ID NO: 2574 - RNA, 17 nt, Artificial Sequence
  Description of Artificial Sequence:  Enzymatic Nucleic Acid
uuaguccuuuauuauug

SEQ ID NO: 2575 - RNA, 17 nt, Artificial Sequence
  Description of Artificial Sequence:  Enzymatic Nucleic Acid
uaguccuuuauuauuga

SEQ ID NO: 2576 - RNA, 17 nt, Artificial Sequence
  Description of Artificial Sequence:  Enzymatic Nucleic Acid
aguccuuuauuauugac

SEQ ID NO: 2577 - RNA, 17 nt, Artificial Sequence
  Description of Artificial Sequence:  Enzymatic Nucleic Acid
uccuuuauuauugacaa

SEQ ID NO: 2578 - RNA, 17 nt, Artificial Sequence
  Description of Artificial Sequence:  Enzymatic Nucleic Acid
ccuuuauuauugacaac

SEQ ID NO: 2579 - RNA, 17 nt, Artificial Sequence
  Description of Artificial Sequence:  Enzymatic Nucleic Acid
uuuauuauugacaacaa

SEQ ID NO: 2580 - RNA, 17 nt, Artificial Sequence
  Description of Artificial Sequence:  Enzymatic Nucleic Acid
caacgaauucuucagaa

SEQ ID NO: 2581 - RNA, 17 nt, Artificial Sequence
  Description of Artificial Sequence:  Enzymatic Nucleic Acid
aacgaauucuucagaag

SEQ ID NO: 2582 - RNA, 17 nt, Artificial Sequence
  Description of Artificial Sequence:  Enzymatic Nucleic Acid
cgaauucuucagaagga

SEQ ID NO: 2583 - RNA, 17 nt, Artificial Sequence
  Description of Artificial Sequence:  Enzymatic Nucleic Acid
gaauucuucagaaggau

SEQ ID NO: 2584 - RNA, 17 nt, Artificial Sequence
  Description of Artificial Sequence:  Enzymatic Nucleic Acid
agaaggauuauccaugg

SEQ ID NO: 2585 - RNA, 17 nt, Artificial Sequence
  Description of Artificial Sequence:  Enzymatic Nucleic Acid
gaaggauuauccauggg

SEQ ID NO: 2586 - RNA, 17 nt, Artificial Sequence
  Description of Artificial Sequence:  Enzymatic Nucleic Acid
aggauuauccaugggga

SEQ ID NO: 2587 - RNA, 17 nt, Artificial Sequence
  Description of Artificial Sequence:  Enzymatic Nucleic Acid
uggggaauuacauaggc

SEQ ID NO: 2588 - RNA, 17 nt, Artificial Sequence
  Description of Artificial Sequence:  Enzymatic Nucleic Acid
ggggaauuacauaggcc

SEQ ID NO: 2589 - RNA, 17 nt, Artificial Sequence
  Description of Artificial Sequence:  Enzymatic Nucleic Acid
aauuacauaggccuuau

SEQ ID NO: 2590 - RNA, 17 nt, Artificial Sequence
  Description of Artificial Sequence:  Enzymatic Nucleic Acid
auaggccuuaucaauag

SEQ ID NO: 2591 - RNA, 17 nt, Artificial Sequence
  Description of Artificial Sequence:  Enzymatic Nucleic Acid
uaggccuuaucaauaga

SEQ ID NO: 2592 - RNA, 17 nt, Artificial Sequence
  Description of Artificial Sequence:  Enzymatic Nucleic Acid
ggccuuaucaauagaau

SEQ ID NO: 2593 - RNA, 17 nt, Artificial Sequence
  Description of Artificial Sequence:  Enzymatic Nucleic Acid
uuaucaauagaauugcc

SEQ ID NO: 2594 - RNA, 17 nt, Artificial Sequence
  Description of Artificial Sequence:  Enzymatic Nucleic Acid
aauagaauugcccagaa

SEQ ID NO: 2595 - RNA, 17 nt, Artificial Sequence
  Description of Artificial Sequence:  Enzymatic Nucleic Acid
aaaagacuaacuguaaa

SEQ ID NO: 2596 - RNA, 17 nt, Artificial Sequence
  Description of Artificial Sequence:  Enzymatic Nucleic Acid
cuaacuguaaauuauga

SEQ ID NO: 2597 - RNA, 17 nt, Artificial Sequence
  Description of Artificial Sequence:  Enzymatic Nucleic Acid
cuguaaauuaugaacag

SEQ ID NO: 2598 - RNA, 17 nt, Artificial Sequence
  Description of Artificial Sequence:  Enzymatic Nucleic Acid
uguaaauuaugaacagu

SEQ ID NO: 2599 - RNA, 17 nt, Artificial Sequence
  Description of Artificial Sequence:  Enzymatic Nucleic Acid
gugugcaucgggggugc

SEQ ID NO: 2600 - RNA, 17 nt, Artificial Sequence
  Description of Artificial Sequence:  Enzymatic Nucleic Acid
agaaggauuucauuaua

SEQ ID NO: 2601 - RNA, 17 nt, Artificial Sequence
  Description of Artificial Sequence:  Enzymatic Nucleic Acid
gaaggauuucauuauaa

SEQ ID NO: 2602 - RNA, 17 nt, Artificial Sequence
  Description of Artificial Sequence:  Enzymatic Nucleic Acid
aaggauuucauuauaaa

SEQ ID NO: 2603 - RNA, 17 nt, Artificial Sequence
  Description of Artificial Sequence:  Enzymatic Nucleic Acid
gauuucauuauaaaugc

SEQ ID NO: 2604 - RNA, 17 nt, Artificial Sequence
  Description of Artificial Sequence:  Enzymatic Nucleic Acid
auuucauuauaaaugca

SEQ ID NO: 2605 - RNA, 17 nt, Artificial Sequence
  Description of Artificial Sequence:  Enzymatic Nucleic Acid
uucauuauaaaugcaaa

SEQ ID NO: 2606 - RNA, 17 nt, Artificial Sequence
  Description of Artificial Sequence:  Enzymatic Nucleic Acid
gaaagaauauaguauug

SEQ ID NO: 2607 - RNA, 17 nt, Artificial Sequence
  Description of Artificial Sequence:  Enzymatic Nucleic Acid
aagaauauaguauuggu

SEQ ID NO: 2608 - RNA, 17 nt, Artificial Sequence
  Description of Artificial Sequence:  Enzymatic Nucleic Acid
aauauaguauugguaca

SEQ ID NO: 2609 - RNA, 17 nt, Artificial Sequence
  Description of Artificial Sequence:  Enzymatic Nucleic Acid
uauaguauugguacagg

SEQ ID NO: 2610 - RNA, 17 nt, Artificial Sequence
  Description of Artificial Sequence:  Enzymatic Nucleic Acid
guauugguacagguucu

SEQ ID NO: 2611 - RNA, 17 nt, Artificial Sequence
  Description of Artificial Sequence:  Enzymatic Nucleic Acid
guacagguucuacuaaa

SEQ ID NO: 2612 - RNA, 17 nt, Artificial Sequence
  Description of Artificial Sequence:  Enzymatic Nucleic Acid
uacagguucuacuaaac

SEQ ID NO: 2613 - RNA, 17 nt, Artificial Sequence
  Description of Artificial Sequence:  Enzymatic Nucleic Acid
cagguucuacuaaacag

SEQ ID NO: 2614 - RNA, 17 nt, Artificial Sequence
  Description of Artificial Sequence:  Enzymatic Nucleic Acid
guucuacuaaacaggaa

SEQ ID NO: 2615 - RNA, 17 nt, Artificial Sequence
  Description of Artificial Sequence:  Enzymatic Nucleic Acid
aaaacaauuggccgcua

SEQ ID NO: 2616 - RNA, 17 nt, Artificial Sequence
  Description of Artificial Sequence:  Enzymatic Nucleic Acid
uggccgcuaaacuugca

SEQ ID NO: 2617 - RNA, 17 nt, Artificial Sequence
  Description of Artificial Sequence:  Enzymatic Nucleic Acid
gcuaaacuugcauaucu

SEQ ID NO: 2618 - RNA, 17 nt, Artificial Sequence
  Description of Artificial Sequence:  Enzymatic Nucleic Acid
acuugcauaucuucaga

SEQ ID NO: 2619 - RNA, 17 nt, Artificial Sequence
  Description of Artificial Sequence:  Enzymatic Nucleic Acid
uugcauaucuucagaua

SEQ ID NO: 2620 - RNA, 17 nt, Artificial Sequence
  Description of Artificial Sequence:  Enzymatic Nucleic Acid
gcauaucuucagauauu

SEQ ID NO: 2621 - RNA, 17 nt, Artificial Sequence
  Description of Artificial Sequence:  Enzymatic Nucleic Acid
cauaucuucagauauua

SEQ ID NO: 2622 - RNA, 17 nt, Artificial Sequence
  Description of Artificial Sequence:  Enzymatic Nucleic Acid
cuucagauauuaucaga

SEQ ID NO: 2623 - RNA, 17 nt, Artificial Sequence
  Description of Artificial Sequence:  Enzymatic Nucleic Acid
ucagauauuaucagaag

SEQ ID NO: 2624 - RNA, 17 nt, Artificial Sequence
  Description of Artificial Sequence:  Enzymatic Nucleic Acid
cagauauuaucagaaga

SEQ ID NO: 2625 - RNA, 17 nt, Artificial Sequence
  Description of Artificial Sequence:  Enzymatic Nucleic Acid
gauauuaucagaagaaa

SEQ ID NO: 2626 - RNA, 17 nt, Artificial Sequence
  Description of Artificial Sequence:  Enzymatic Nucleic Acid
agaaaccucagugaaau

SEQ ID NO: 2627 - RNA, 17 nt, Artificial Sequence
  Description of Artificial Sequence:  Enzymatic Nucleic Acid
agugaaaucugacuacc

SEQ ID NO: 2628 - RNA, 17 nt, Artificial Sequence
  Description of Artificial Sequence:  Enzymatic Nucleic Acid
aucugacuaccuguccu

SEQ ID NO: 2629 - RNA, 17 nt, Artificial Sequence
  Description of Artificial Sequence:  Enzymatic Nucleic Acid
cuaccuguccucugguu

SEQ ID NO: 2630 - RNA, 17 nt, Artificial Sequence
  Description of Artificial Sequence:  Enzymatic Nucleic Acid
ccuguccucugguucuu

SEQ ID NO: 2631 - RNA, 17 nt, Artificial Sequence
  Description of Artificial Sequence:  Enzymatic Nucleic Acid
ccucugguucuuuugcu

SEQ ID NO: 2632 - RNA, 17 nt, Artificial Sequence
  Description of Artificial Sequence:  Enzymatic Nucleic Acid
cucugguucuuuugcua

SEQ ID NO: 2633 - RNA, 17 nt, Artificial Sequence
  Description of Artificial Sequence:  Enzymatic Nucleic Acid
cugguucuuuugcuacu

SEQ ID NO: 2634 - RNA, 17 nt, Artificial Sequence
  Description of Artificial Sequence:  Enzymatic Nucleic Acid
ugguucuuuugcuacua

SEQ ID NO: 2635 - RNA, 17 nt, Artificial Sequence
  Description of Artificial Sequence:  Enzymatic Nucleic Acid
gguucuuuugcuacuac

SEQ ID NO: 2636 - RNA, 17 nt, Artificial Sequence
  Description of Artificial Sequence:  Enzymatic Nucleic Acid
cuuuugcuacuacgugu

SEQ ID NO: 2637 - RNA, 17 nt, Artificial Sequence
  Description of Artificial Sequence:  Enzymatic Nucleic Acid
uugcuacuacgugugag

SEQ ID NO: 2638 - RNA, 17 nt, Artificial Sequence
  Description of Artificial Sequence:  Enzymatic Nucleic Acid
gugugagucccaaagca

SEQ ID NO: 2639 - RNA, 17 nt, Artificial Sequence
  Description of Artificial Sequence:  Enzymatic Nucleic Acid
aagcaacucuuuaguga

SEQ ID NO: 2640 - RNA, 17 nt, Artificial Sequence
  Description of Artificial Sequence:  Enzymatic Nucleic Acid
gcaacucuuuagugacc

SEQ ID NO: 2641 - RNA, 17 nt, Artificial Sequence
  Description of Artificial Sequence:  Enzymatic Nucleic Acid
caacucuuuagugacca

SEQ ID NO: 2642 - RNA, 17 nt, Artificial Sequence
  Description of Artificial Sequence:  Enzymatic Nucleic Acid
aacucuuuagugaccag

SEQ ID NO: 2643 - RNA, 17 nt, Artificial Sequence
  Description of Artificial Sequence:  Enzymatic Nucleic Acid
agcacacucgcuucuga

SEQ ID NO: 2644 - RNA, 17 nt, Artificial Sequence
  Description of Artificial Sequence:  Enzymatic Nucleic Acid
cacucgcuucugaauca

SEQ ID NO: 2645 - RNA, 17 nt, Artificial Sequence
  Description of Artificial Sequence:  Enzymatic Nucleic Acid
acucgcuucugaaucau

SEQ ID NO: 2646 - RNA, 17 nt, Artificial Sequence
  Description of Artificial Sequence:  Enzymatic Nucleic Acid
uucugaaucaucaucug

SEQ ID NO: 2647 - RNA, 17 nt, Artificial Sequence
  Description of Artificial Sequence:  Enzymatic Nucleic Acid
ugaaucaucaucugaag

SEQ ID NO: 2648 - RNA, 17 nt, Artificial Sequence
  Description of Artificial Sequence:  Enzymatic Nucleic Acid
aucaucaucugaaggug

SEQ ID NO: 2649 - RNA, 17 nt, Artificial Sequence
  Description of Artificial Sequence:  Enzymatic Nucleic Acid
aggugacuucucagcag

SEQ ID NO: 2650 - RNA, 17 nt, Artificial Sequence
  Description of Artificial Sequence:  Enzymatic Nucleic Acid
ggugacuucucagcaga

SEQ ID NO: 2651 - RNA, 17 nt, Artificial Sequence
  Description of Artificial Sequence:  Enzymatic Nucleic Acid
ugacuucucagcagaua

SEQ ID NO: 2652 - RNA, 17 nt, Artificial Sequence
  Description of Artificial Sequence:  Enzymatic Nucleic Acid
cagcagauacaucagag

SEQ ID NO: 2653 - RNA, 17 nt, Artificial Sequence
  Description of Artificial Sequence:  Enzymatic Nucleic Acid
agauacaucagagauaa

SEQ ID NO: 2654 - RNA, 17 nt, Artificial Sequence
  Description of Artificial Sequence:  Enzymatic Nucleic Acid
ucagagauaaauucuaa

SEQ ID NO: 2655 - RNA, 17 nt, Artificial Sequence
  Description of Artificial Sequence:  Enzymatic Nucleic Acid
agauaaauucuaacagu

SEQ ID NO: 2656 - RNA, 17 nt, Artificial Sequence
  Description of Artificial Sequence:  Enzymatic Nucleic Acid
gauaaauucuaacagug

SEQ ID NO: 2657 - RNA, 17 nt, Artificial Sequence
  Description of Artificial Sequence:  Enzymatic Nucleic Acid
uaaauucuaacagugac

SEQ ID NO: 2658 - RNA, 17 nt, Artificial Sequence
  Description of Artificial Sequence:  Enzymatic Nucleic Acid
gugacaguuuaaacagu

SEQ ID NO: 2659 - RNA, 17 nt, Artificial Sequence
  Description of Artificial Sequence:  Enzymatic Nucleic Acid
ugacaguuuaaacaguu

SEQ ID NO: 2660 - RNA, 17 nt, Artificial Sequence
  Description of Artificial Sequence:  Enzymatic Nucleic Acid
gacaguuuaaacaguuc

SEQ ID NO: 2661 - RNA, 17 nt, Artificial Sequence
  Description of Artificial Sequence:  Enzymatic Nucleic Acid
uaaacaguucuucguug

SEQ ID NO: 2662 - RNA, 17 nt, Artificial Sequence
  Description of Artificial Sequence:  Enzymatic Nucleic Acid
aaacaguucuucguugc

SEQ ID NO: 2663 - RNA, 17 nt, Artificial Sequence
  Description of Artificial Sequence:  Enzymatic Nucleic Acid
acaguucuucguugcuu

SEQ ID NO: 2664 - RNA, 17 nt, Artificial Sequence
  Description of Artificial Sequence:  Enzymatic Nucleic Acid
caguucuucguugcuua

SEQ ID NO: 2665 - RNA, 17 nt, Artificial Sequence
  Description of Artificial Sequence:  Enzymatic Nucleic Acid
uucuucguugcuuauga

SEQ ID NO: 2666 - RNA, 17 nt, Artificial Sequence
  Description of Artificial Sequence:  Enzymatic Nucleic Acid
ucguugcuuaugaaugg

SEQ ID NO: 2667 - RNA, 17 nt, Artificial Sequence
  Description of Artificial Sequence:  Enzymatic Nucleic Acid
cguugcuuaugaauggu

SEQ ID NO: 2668 - RNA, 17 nt, Artificial Sequence
  Description of Artificial Sequence:  Enzymatic Nucleic Acid
ugaauggucucagaaau

SEQ ID NO: 2669 - RNA, 17 nt, Artificial Sequence
  Description of Artificial Sequence:  Enzymatic Nucleic Acid
aauggucucagaaauaa

SEQ ID NO: 2670 - RNA, 17 nt, Artificial Sequence
  Description of Artificial Sequence:  Enzymatic Nucleic Acid
ucagaaauaaucaaagg

SEQ ID NO: 2671 - RNA, 17 nt, Artificial Sequence
  Description of Artificial Sequence:  Enzymatic Nucleic Acid
gaaauaaucaaaggaag

SEQ ID NO: 2672 - RNA, 17 nt, Artificial Sequence
  Description of Artificial Sequence:  Enzymatic Nucleic Acid
aaaaagaucuuuggcac

SEQ ID NO: 2673 - RNA, 17 nt, Artificial Sequence
  Description of Artificial Sequence:  Enzymatic Nucleic Acid
aaagaucuuuggcaccc

SEQ ID NO: 2674 - RNA, 17 nt, Artificial Sequence
  Description of Artificial Sequence:  Enzymatic Nucleic Acid
aagaucuuuggcaccca

SEQ ID NO: 2675 - RNA, 17 nt, Artificial Sequence
  Description of Artificial Sequence:  Enzymatic Nucleic Acid
acccagauuugaccuuc

SEQ ID NO: 2676 - RNA, 17 nt, Artificial Sequence
  Description of Artificial Sequence:  Enzymatic Nucleic Acid
cccagauuugaccuucc

SEQ ID NO: 2677 - RNA, 17 nt, Artificial Sequence
  Description of Artificial Sequence:  Enzymatic Nucleic Acid
uuugaccuuccugacau

SEQ ID NO: 2678 - RNA, 17 nt, Artificial Sequence
  Description of Artificial Sequence:  Enzymatic Nucleic Acid
uugaccuuccugacaug

SEQ ID NO: 2679 - RNA, 17 nt, Artificial Sequence
  Description of Artificial Sequence:  Enzymatic Nucleic Acid
aacaaaguauacugugg

SEQ ID NO: 2680 - RNA, 17 nt, Artificial Sequence
  Description of Artificial Sequence:  Enzymatic Nucleic Acid
caaaguauacuguggac

SEQ ID NO: 2681 - RNA, 17 nt, Artificial Sequence
  Description of Artificial Sequence:  Enzymatic Nucleic Acid
caagagguuuggcaugg

SEQ ID NO: 2682 - RNA, 17 nt, Artificial Sequence
  Description of Artificial Sequence:  Enzymatic Nucleic Acid
aagagguuuggcaugga

SEQ ID NO: 2683 - RNA, 17 nt, Artificial Sequence
  Description of Artificial Sequence:  Enzymatic Nucleic Acid
gcauggauuuuaaagaa

SEQ ID NO: 2684 - RNA, 17 nt, Artificial Sequence
  Description of Artificial Sequence:  Enzymatic Nucleic Acid
cauggauuuuaaagaaa

SEQ ID NO: 2685 - RNA, 17 nt, Artificial Sequence
  Description of Artificial Sequence:  Enzymatic Nucleic Acid
auggauuuuaaagaaau

SEQ ID NO: 2686 - RNA, 17 nt, Artificial Sequence
  Description of Artificial Sequence:  Enzymatic Nucleic Acid
uggauuuuaaagaaaua

SEQ ID NO: 2687 - RNA, 17 nt, Artificial Sequence
  Description of Artificial Sequence:  Enzymatic Nucleic Acid
aaagaaauagaauuaau

SEQ ID NO: 2688 - RNA, 17 nt, Artificial Sequence
  Description of Artificial Sequence:  Enzymatic Nucleic Acid
aauagaauuaauuggcu

SEQ ID NO: 2689 - RNA, 17 nt, Artificial Sequence
  Description of Artificial Sequence:  Enzymatic Nucleic Acid
auagaauuaauuggcuc

SEQ ID NO: 2690 - RNA, 17 nt, Artificial Sequence
  Description of Artificial Sequence:  Enzymatic Nucleic Acid
gaauuaauuggcucagg

SEQ ID NO: 2691 - RNA, 17 nt, Artificial Sequence
  Description of Artificial Sequence:  Enzymatic Nucleic Acid
aauuggcucagguggau

SEQ ID NO: 2692 - RNA, 17 nt, Artificial Sequence
  Description of Artificial Sequence:  Enzymatic Nucleic Acid
agguggauuuggccaag

SEQ ID NO: 2693 - RNA, 17 nt, Artificial Sequence
  Description of Artificial Sequence:  Enzymatic Nucleic Acid
gguggauuuggccaagu

SEQ ID NO: 2694 - RNA, 17 nt, Artificial Sequence
  Description of Artificial Sequence:  Enzymatic Nucleic Acid
ggccaaguuuucaaagc

SEQ ID NO: 2695 - RNA, 17 nt, Artificial Sequence
  Description of Artificial Sequence:  Enzymatic Nucleic Acid
gccaaguuuucaaagca

SEQ ID NO: 2696 - RNA, 17 nt, Artificial Sequence
  Description of Artificial Sequence:  Enzymatic Nucleic Acid
ccaaguuuucaaagcaa

SEQ ID NO: 2697 - RNA, 17 nt, Artificial Sequence
  Description of Artificial Sequence:  Enzymatic Nucleic Acid
caaguuuucaaagcaaa

SEQ ID NO: 2698 - RNA, 17 nt, Artificial Sequence
  Description of Artificial Sequence:  Enzymatic Nucleic Acid
cacagaauugacggaaa

SEQ ID NO: 2699 - RNA, 17 nt, Artificial Sequence
  Description of Artificial Sequence:  Enzymatic Nucleic Acid
gaaagacuuacguuauu

SEQ ID NO: 2700 - RNA, 17 nt, Artificial Sequence
  Description of Artificial Sequence:  Enzymatic Nucleic Acid
aaagacuuacguuauua

SEQ ID NO: 2701 - RNA, 17 nt, Artificial Sequence
  Description of Artificial Sequence:  Enzymatic Nucleic Acid
acuuacguuauuaaacg

SEQ ID NO: 2702 - RNA, 17 nt, Artificial Sequence
  Description of Artificial Sequence:  Enzymatic Nucleic Acid
cuuacguuauuaaacgu

SEQ ID NO: 2703 - RNA, 17 nt, Artificial Sequence
  Description of Artificial Sequence:  Enzymatic Nucleic Acid
uacguuauuaaacgugu

SEQ ID NO: 2704 - RNA, 17 nt, Artificial Sequence
  Description of Artificial Sequence:  Enzymatic Nucleic Acid
acguuauuaaacguguu

SEQ ID NO: 2705 - RNA, 17 nt, Artificial Sequence
  Description of Artificial Sequence:  Enzymatic Nucleic Acid
aaacguguuaaauauaa

SEQ ID NO: 2706 - RNA, 17 nt, Artificial Sequence
  Description of Artificial Sequence:  Enzymatic Nucleic Acid
aacguguuaaauauaau

SEQ ID NO: 2707 - RNA, 17 nt, Artificial Sequence
  Description of Artificial Sequence:  Enzymatic Nucleic Acid
uguuaaauauaauaacg

SEQ ID NO: 2708 - RNA, 17 nt, Artificial Sequence
  Description of Artificial Sequence:  Enzymatic Nucleic Acid
uuaaauauaauaacgag

SEQ ID NO: 2709 - RNA, 17 nt, Artificial Sequence
  Description of Artificial Sequence:  Enzymatic Nucleic Acid
aauauaauaacgagaag

SEQ ID NO: 2710 - RNA, 17 nt, Artificial Sequence
  Description of Artificial Sequence:  Enzymatic Nucleic Acid
cgugaaguaaaagcauu

SEQ ID NO: 2711 - RNA, 17 nt, Artificial Sequence
  Description of Artificial Sequence:  Enzymatic Nucleic Acid
aaaagcauuggcaaaac

SEQ ID NO: 2712 - RNA, 17 nt, Artificial Sequence
  Description of Artificial Sequence:  Enzymatic Nucleic Acid
gcaaaacuugaucaugu

SEQ ID NO: 2713 - RNA, 17 nt, Artificial Sequence
  Description of Artificial Sequence:  Enzymatic Nucleic Acid
aacuugaucauguaaau

SEQ ID NO: 2714 - RNA, 17 nt, Artificial Sequence
  Description of Artificial Sequence:  Enzymatic Nucleic Acid
gaucauguaaauauugu

SEQ ID NO: 2715 - RNA, 17 nt, Artificial Sequence
  Description of Artificial Sequence:  Enzymatic Nucleic Acid
auguaaauauuguucac

SEQ ID NO: 2716 - RNA, 17 nt, Artificial Sequence
  Description of Artificial Sequence:  Enzymatic Nucleic Acid
guaaauauuguucacua

SEQ ID NO: 2717 - RNA, 17 nt, Artificial Sequence
  Description of Artificial Sequence:  Enzymatic Nucleic Acid
aauauuguucacuacaa

SEQ ID NO: 2718 - RNA, 17 nt, Artificial Sequence
  Description of Artificial Sequence:  Enzymatic Nucleic Acid
auauuguucacuacaau

SEQ ID NO: 2719 - RNA, 17 nt, Artificial Sequence
  Description of Artificial Sequence:  Enzymatic Nucleic Acid
uguucacuacaauggcu

SEQ ID NO: 2720 - RNA, 17 nt, Artificial Sequence
  Description of Artificial Sequence:  Enzymatic Nucleic Acid
auggcuguugggaugga

SEQ ID NO: 2721 - RNA, 17 nt, Artificial Sequence
  Description of Artificial Sequence:  Enzymatic Nucleic Acid
ggauggauuugauuaug

SEQ ID NO: 2722 - RNA, 17 nt, Artificial Sequence
  Description of Artificial Sequence:  Enzymatic Nucleic Acid
gauggauuugauuauga

SEQ ID NO: 2723 - RNA, 17 nt, Artificial Sequence
  Description of Artificial Sequence:  Enzymatic Nucleic Acid
gauuugauuaugauccu

SEQ ID NO: 2724 - RNA, 17 nt, Artificial Sequence
  Description of Artificial Sequence:  Enzymatic Nucleic Acid
auuugauuaugauccug

SEQ ID NO: 2725 - RNA, 17 nt, Artificial Sequence
  Description of Artificial Sequence:  Enzymatic Nucleic Acid
auuaugauccugagacc

SEQ ID NO: 2726 - RNA, 17 nt, Artificial Sequence
  Description of Artificial Sequence:  Enzymatic Nucleic Acid
gugaugauucucuugag

SEQ ID NO: 2727 - RNA, 17 nt, Artificial Sequence
  Description of Artificial Sequence:  Enzymatic Nucleic Acid
ugaugauucucuugaga

SEQ ID NO: 2728 - RNA, 17 nt, Artificial Sequence
  Description of Artificial Sequence:  Enzymatic Nucleic Acid
augauucucuugagagc

SEQ ID NO: 2729 - RNA, 17 nt, Artificial Sequence
  Description of Artificial Sequence:  Enzymatic Nucleic Acid
gauucucuugagagcag

SEQ ID NO: 2730 - RNA, 17 nt, Artificial Sequence
  Description of Artificial Sequence:  Enzymatic Nucleic Acid
gcagugauuaugauccu

SEQ ID NO: 2731 - RNA, 17 nt, Artificial Sequence
  Description of Artificial Sequence:  Enzymatic Nucleic Acid
cagugauuaugauccug

SEQ ID NO: 2732 - RNA, 17 nt, Artificial Sequence
  Description of Artificial Sequence:  Enzymatic Nucleic Acid
auuaugauccugagaac

SEQ ID NO: 2733 - RNA, 17 nt, Artificial Sequence
  Description of Artificial Sequence:  Enzymatic Nucleic Acid
gcaaaaauaguucaagg

SEQ ID NO: 2734 - RNA, 17 nt, Artificial Sequence
  Description of Artificial Sequence:  Enzymatic Nucleic Acid
aaaauaguucaagguca

SEQ ID NO: 2735 - RNA, 17 nt, Artificial Sequence
  Description of Artificial Sequence:  Enzymatic Nucleic Acid
aaauaguucaaggucaa

SEQ ID NO: 2736 - RNA, 17 nt, Artificial Sequence
  Description of Artificial Sequence:  Enzymatic Nucleic Acid
uucaaggucaaagacua

SEQ ID NO: 2737 - RNA, 17 nt, Artificial Sequence
  Description of Artificial Sequence:  Enzymatic Nucleic Acid
caaagacuaagugccuu

SEQ ID NO: 2738 - RNA, 17 nt, Artificial Sequence
  Description of Artificial Sequence:  Enzymatic Nucleic Acid
aagugccuuuucaucca

SEQ ID NO: 2739 - RNA, 17 nt, Artificial Sequence
  Description of Artificial Sequence:  Enzymatic Nucleic Acid
agugccuuuucauccaa

SEQ ID NO: 2740 - RNA, 17 nt, Artificial Sequence
  Description of Artificial Sequence:  Enzymatic Nucleic Acid
gugccuuuucauccaaa

SEQ ID NO: 2741 - RNA, 17 nt, Artificial Sequence
  Description of Artificial Sequence:  Enzymatic Nucleic Acid
ugccuuuucauccaaau

SEQ ID NO: 2742 - RNA, 17 nt, Artificial Sequence
  Description of Artificial Sequence:  Enzymatic Nucleic Acid
cuuuucauccaaaugga

SEQ ID NO: 2743 - RNA, 17 nt, Artificial Sequence
  Description of Artificial Sequence:  Enzymatic Nucleic Acid
aauggaauucugugaua

SEQ ID NO: 2744 - RNA, 17 nt, Artificial Sequence
  Description of Artificial Sequence:  Enzymatic Nucleic Acid
auggaauucugugauaa

SEQ ID NO: 2745 - RNA, 17 nt, Artificial Sequence
  Description of Artificial Sequence:  Enzymatic Nucleic Acid
ucugugauaaagggacc

SEQ ID NO: 2746 - RNA, 17 nt, Artificial Sequence
  Description of Artificial Sequence:  Enzymatic Nucleic Acid
agggaccuuggaacaau

SEQ ID NO: 2747 - RNA, 17 nt, Artificial Sequence
  Description of Artificial Sequence:  Enzymatic Nucleic Acid
caauggauugaaaaaag

SEQ ID NO: 2748 - RNA, 17 nt, Artificial Sequence
  Description of Artificial Sequence:  Enzymatic Nucleic Acid
gagaaacuagacaaagu

SEQ ID NO: 2749 - RNA, 17 nt, Artificial Sequence
  Description of Artificial Sequence:  Enzymatic Nucleic Acid
gacaaaguuuuggcuuu

SEQ ID NO: 2750 - RNA, 17 nt, Artificial Sequence
  Description of Artificial Sequence:  Enzymatic Nucleic Acid
acaaaguuuuggcuuug

SEQ ID NO: 2751 - RNA, 17 nt, Artificial Sequence
  Description of Artificial Sequence:  Enzymatic Nucleic Acid
caaaguuuuggcuuugg

SEQ ID NO: 2752 - RNA, 17 nt, Artificial Sequence
  Description of Artificial Sequence:  Enzymatic Nucleic Acid
uuuuggcuuuggaacuc

SEQ ID NO: 2753 - RNA, 17 nt, Artificial Sequence
  Description of Artificial Sequence:  Enzymatic Nucleic Acid
uuuggcuuuggaacucu

SEQ ID NO: 2754 - RNA, 17 nt, Artificial Sequence
  Description of Artificial Sequence:  Enzymatic Nucleic Acid
uuggaacucuuugaaca

SEQ ID NO: 2755 - RNA, 17 nt, Artificial Sequence
  Description of Artificial Sequence:  Enzymatic Nucleic Acid
ggaacucuuugaacaaa

SEQ ID NO: 2756 - RNA, 17 nt, Artificial Sequence
  Description of Artificial Sequence:  Enzymatic Nucleic Acid
gaacucuuugaacaaau

SEQ ID NO: 2757 - RNA, 17 nt, Artificial Sequence
  Description of Artificial Sequence:  Enzymatic Nucleic Acid
gaacaaauaacaaaagg

SEQ ID NO: 2758 - RNA, 17 nt, Artificial Sequence
  Description of Artificial Sequence:  Enzymatic Nucleic Acid
ggguggauuauauacau

SEQ ID NO: 2759 - RNA, 17 nt, Artificial Sequence
  Description of Artificial Sequence:  Enzymatic Nucleic Acid
gguggauuauauacauu

SEQ ID NO: 2760 - RNA, 17 nt, Artificial Sequence
  Description of Artificial Sequence:  Enzymatic Nucleic Acid
uggauuauauacauuca

SEQ ID NO: 2761 - RNA, 17 nt, Artificial Sequence
  Description of Artificial Sequence:  Enzymatic Nucleic Acid
gauuauauacauucaaa

SEQ ID NO: 2762 - RNA, 17 nt, Artificial Sequence
  Description of Artificial Sequence:  Enzymatic Nucleic Acid
auauacauucaaaaaaa

SEQ ID NO: 2763 - RNA, 17 nt, Artificial Sequence
  Description of Artificial Sequence:  Enzymatic Nucleic Acid
uauacauucaaaaaaau

SEQ ID NO: 2764 - RNA, 17 nt, Artificial Sequence
  Description of Artificial Sequence:  Enzymatic Nucleic Acid
aaaaaaauuaauucaua

SEQ ID NO: 2765 - RNA, 17 nt, Artificial Sequence
  Description of Artificial Sequence:  Enzymatic Nucleic Acid
aaaaaauuaauucauag

SEQ ID NO: 2766 - RNA, 17 nt, Artificial Sequence
  Description of Artificial Sequence:  Enzymatic Nucleic Acid
aaauuaauucauagaga

SEQ ID NO: 2767 - RNA, 17 nt, Artificial Sequence
  Description of Artificial Sequence:  Enzymatic Nucleic Acid
aauuaauucauagagau

SEQ ID NO: 2768 - RNA, 17 nt, Artificial Sequence
  Description of Artificial Sequence:  Enzymatic Nucleic Acid
uaauucauagagaucuu

SEQ ID NO: 2769 - RNA, 17 nt, Artificial Sequence
  Description of Artificial Sequence:  Enzymatic Nucleic Acid
auagagaucuuaagcca

SEQ ID NO: 2770 - RNA, 17 nt, Artificial Sequence
  Description of Artificial Sequence:  Enzymatic Nucleic Acid
agagaucuuaagccaag

SEQ ID NO: 2771 - RNA, 17 nt, Artificial Sequence
  Description of Artificial Sequence:  Enzymatic Nucleic Acid
gagaucuuaagccaagu

SEQ ID NO: 2772 - RNA, 17 nt, Artificial Sequence
  Description of Artificial Sequence:  Enzymatic Nucleic Acid
agccaaguaauauauuc

SEQ ID NO: 2773 - RNA, 17 nt, Artificial Sequence
  Description of Artificial Sequence:  Enzymatic Nucleic Acid
caaguaauauauucuua

SEQ ID NO: 2774 - RNA, 17 nt, Artificial Sequence
  Description of Artificial Sequence:  Enzymatic Nucleic Acid
aguaauauauucuuagu

SEQ ID NO: 2775 - RNA, 17 nt, Artificial Sequence
  Description of Artificial Sequence:  Enzymatic Nucleic Acid
uaauauauucuuaguag

SEQ ID NO: 2776 - RNA, 17 nt, Artificial Sequence
  Description of Artificial Sequence:  Enzymatic Nucleic Acid
aauauauucuuaguaga

SEQ ID NO: 2777 - RNA, 17 nt, Artificial Sequence
  Description of Artificial Sequence:  Enzymatic Nucleic Acid
uauauucuuaguagaua

SEQ ID NO: 2778 - RNA, 17 nt, Artificial Sequence
  Description of Artificial Sequence:  Enzymatic Nucleic Acid
auauucuuaguagauac

SEQ ID NO: 2779 - RNA, 17 nt, Artificial Sequence
  Description of Artificial Sequence:  Enzymatic Nucleic Acid
uucuuaguagauacaaa

SEQ ID NO: 2780 - RNA, 17 nt, Artificial Sequence
  Description of Artificial Sequence:  Enzymatic Nucleic Acid
uaguagauacaaaacaa

SEQ ID NO: 2781 - RNA, 17 nt, Artificial Sequence
  Description of Artificial Sequence:  Enzymatic Nucleic Acid
aaacaaguaaagauugg

SEQ ID NO: 2782 - RNA, 17 nt, Artificial Sequence
  Description of Artificial Sequence:  Enzymatic Nucleic Acid
guaaagauuggagacuu

SEQ ID NO: 2783 - RNA, 17 nt, Artificial Sequence
  Description of Artificial Sequence:  Enzymatic Nucleic Acid
uggagacuuuggacuug

SEQ ID NO: 2784 - RNA, 17 nt, Artificial Sequence
  Description of Artificial Sequence:  Enzymatic Nucleic Acid
ggagacuuuggacuugu

SEQ ID NO: 2785 - RNA, 17 nt, Artificial Sequence
  Description of Artificial Sequence:  Enzymatic Nucleic Acid
uuuggacuuguaacauc

SEQ ID NO: 2786 - RNA, 17 nt, Artificial Sequence
  Description of Artificial Sequence:  Enzymatic Nucleic Acid
ggacuuguaacaucucu

SEQ ID NO: 2787 - RNA, 17 nt, Artificial Sequence
  Description of Artificial Sequence:  Enzymatic Nucleic Acid
uguaacaucucugaaaa

SEQ ID NO: 2788 - RNA, 17 nt, Artificial Sequence
  Description of Artificial Sequence:  Enzymatic Nucleic Acid
uaacaucucugaaaaau

SEQ ID NO: 2789 - RNA, 17 nt, Artificial Sequence
  Description of Artificial Sequence:  Enzymatic Nucleic Acid
caaggaguaagggaacu

SEQ ID NO: 2790 - RNA, 17 nt, Artificial Sequence
  Description of Artificial Sequence:  Enzymatic Nucleic Acid
agggaacuuugcgauac

SEQ ID NO: 2791 - RNA, 17 nt, Artificial Sequence
  Description of Artificial Sequence:  Enzymatic Nucleic Acid
gggaacuuugcgauaca

SEQ ID NO: 2792 - RNA, 17 nt, Artificial Sequence
  Description of Artificial Sequence:  Enzymatic Nucleic Acid
uuugcgauacaugagcc

SEQ ID NO: 2793 - RNA, 17 nt, Artificial Sequence
  Description of Artificial Sequence:  Enzymatic Nucleic Acid
gaacagauuucuucgca

SEQ ID NO: 2794 - RNA, 17 nt, Artificial Sequence
  Description of Artificial Sequence:  Enzymatic Nucleic Acid
aacagauuucuucgcaa

SEQ ID NO: 2795 - RNA, 17 nt, Artificial Sequence
  Description of Artificial Sequence:  Enzymatic Nucleic Acid
acagauuucuucgcaag

SEQ ID NO: 2796 - RNA, 17 nt, Artificial Sequence
  Description of Artificial Sequence:  Enzymatic Nucleic Acid
agauuucuucgcaagac

SEQ ID NO: 2797 - RNA, 17 nt, Artificial Sequence
  Description of Artificial Sequence:  Enzymatic Nucleic Acid
gauuucuucgcaagacu

SEQ ID NO: 2798 - RNA, 17 nt, Artificial Sequence
  Description of Artificial Sequence:  Enzymatic Nucleic Acid
gcaagacuauggaaagg

SEQ ID NO: 2799 - RNA, 17 nt, Artificial Sequence
  Description of Artificial Sequence:  Enzymatic Nucleic Acid
guggaccucuacgcuuu

SEQ ID NO: 2800 - RNA, 17 nt, Artificial Sequence
  Description of Artificial Sequence:  Enzymatic Nucleic Acid
ggaccucuacgcuuugg

SEQ ID NO: 2801 - RNA, 17 nt, Artificial Sequence
  Description of Artificial Sequence:  Enzymatic Nucleic Acid
ucuacgcuuuggggcua

SEQ ID NO: 2802 - RNA, 17 nt, Artificial Sequence
  Description of Artificial Sequence:  Enzymatic Nucleic Acid
cuacgcuuuggggcuaa

SEQ ID NO: 2803 - RNA, 17 nt, Artificial Sequence
  Description of Artificial Sequence:  Enzymatic Nucleic Acid
uuggggcuaauucuugc

SEQ ID NO: 2804 - RNA, 17 nt, Artificial Sequence
  Description of Artificial Sequence:  Enzymatic Nucleic Acid
gggcuaauucuugcuga

SEQ ID NO: 2805 - RNA, 17 nt, Artificial Sequence
  Description of Artificial Sequence:  Enzymatic Nucleic Acid
ggcuaauucuugcugaa

SEQ ID NO: 2806 - RNA, 17 nt, Artificial Sequence
  Description of Artificial Sequence:  Enzymatic Nucleic Acid
cuaauucuugcugaacu

SEQ ID NO: 2807 - RNA, 17 nt, Artificial Sequence
  Description of Artificial Sequence:  Enzymatic Nucleic Acid
gcugaacuucuucaugu

SEQ ID NO: 2808 - RNA, 17 nt, Artificial Sequence
  Description of Artificial Sequence:  Enzymatic Nucleic Acid
cugaacuucuucaugua

SEQ ID NO: 2809 - RNA, 17 nt, Artificial Sequence
  Description of Artificial Sequence:  Enzymatic Nucleic Acid
gaacuucuucauguaug

SEQ ID NO: 2810 - RNA, 17 nt, Artificial Sequence
  Description of Artificial Sequence:  Enzymatic Nucleic Acid
aacuucuucauguaugu

SEQ ID NO: 2811 - RNA, 17 nt, Artificial Sequence
  Description of Artificial Sequence:  Enzymatic Nucleic Acid
cuucauguaugugacac

SEQ ID NO: 2812 - RNA, 17 nt, Artificial Sequence
  Description of Artificial Sequence:  Enzymatic Nucleic Acid
acacugcuuuugaaaca

SEQ ID NO: 2813 - RNA, 17 nt, Artificial Sequence
  Description of Artificial Sequence:  Enzymatic Nucleic Acid
cacugcuuuugaaacau

SEQ ID NO: 2814 - RNA, 17 nt, Artificial Sequence
  Description of Artificial Sequence:  Enzymatic Nucleic Acid
acugcuuuugaaacauc

SEQ ID NO: 2815 - RNA, 17 nt, Artificial Sequence
  Description of Artificial Sequence:  Enzymatic Nucleic Acid
ugaaacaucaaaguuuu

SEQ ID NO: 2816 - RNA, 17 nt, Artificial Sequence
  Description of Artificial Sequence:  Enzymatic Nucleic Acid
aucaaaguuuuucacag

SEQ ID NO: 2817 - RNA, 17 nt, Artificial Sequence
  Description of Artificial Sequence:  Enzymatic Nucleic Acid
ucaaaguuuuucacaga

SEQ ID NO: 2818 - RNA, 17 nt, Artificial Sequence
  Description of Artificial Sequence:  Enzymatic Nucleic Acid
caaaguuuuucacagac

SEQ ID NO: 2819 - RNA, 17 nt, Artificial Sequence
  Description of Artificial Sequence:  Enzymatic Nucleic Acid
aaaguuuuucacagacc

SEQ ID NO: 2820 - RNA, 17 nt, Artificial Sequence
  Description of Artificial Sequence:  Enzymatic Nucleic Acid
aaguuuuucacagaccu

SEQ ID NO: 2821 - RNA, 17 nt, Artificial Sequence
  Description of Artificial Sequence:  Enzymatic Nucleic Acid
acagaccuacgggaugg

SEQ ID NO: 2822 - RNA, 17 nt, Artificial Sequence
  Description of Artificial Sequence:  Enzymatic Nucleic Acid
gauggcaucaucucaga

SEQ ID NO: 2823 - RNA, 17 nt, Artificial Sequence
  Description of Artificial Sequence:  Enzymatic Nucleic Acid
ggcaucaucucagauau

SEQ ID NO: 2824 - RNA, 17 nt, Artificial Sequence
  Description of Artificial Sequence:  Enzymatic Nucleic Acid
caucaucucagauauau

SEQ ID NO: 2825 - RNA, 17 nt, Artificial Sequence
  Description of Artificial Sequence:  Enzymatic Nucleic Acid
ucucagauauauuugau

SEQ ID NO: 2826 - RNA, 17 nt, Artificial Sequence
  Description of Artificial Sequence:  Enzymatic Nucleic Acid
ucagauauauuugauaa

SEQ ID NO: 2827 - RNA, 17 nt, Artificial Sequence
  Description of Artificial Sequence:  Enzymatic Nucleic Acid
agauauauuugauaaaa

SEQ ID NO: 2828 - RNA, 17 nt, Artificial Sequence
  Description of Artificial Sequence:  Enzymatic Nucleic Acid
gauauauuugauaaaaa

SEQ ID NO: 2829 - RNA, 17 nt, Artificial Sequence
  Description of Artificial Sequence:  Enzymatic Nucleic Acid
uauuugauaaaaaagaa

SEQ ID NO: 2830 - RNA, 17 nt, Artificial Sequence
  Description of Artificial Sequence:  Enzymatic Nucleic Acid
aaaaaacucuucuacag

SEQ ID NO: 2831 - RNA, 17 nt, Artificial Sequence
  Description of Artificial Sequence:  Enzymatic Nucleic Acid
aaaacucuucuacagaa

SEQ ID NO: 2832 - RNA, 17 nt, Artificial Sequence
  Description of Artificial Sequence:  Enzymatic Nucleic Acid
aaacucuucuacagaaa

SEQ ID NO: 2833 - RNA, 17 nt, Artificial Sequence
  Description of Artificial Sequence:  Enzymatic Nucleic Acid
acucuucuacagaaauu

SEQ ID NO: 2834 - RNA, 17 nt, Artificial Sequence
  Description of Artificial Sequence:  Enzymatic Nucleic Acid
acagaaauuacucucaa

SEQ ID NO: 2835 - RNA, 17 nt, Artificial Sequence
  Description of Artificial Sequence:  Enzymatic Nucleic Acid
cagaaauuacucucaaa

SEQ ID NO: 2836 - RNA, 17 nt, Artificial Sequence
  Description of Artificial Sequence:  Enzymatic Nucleic Acid
aaauuacucucaaagaa

SEQ ID NO: 2837 - RNA, 17 nt, Artificial Sequence
  Description of Artificial Sequence:  Enzymatic Nucleic Acid
auuacucucaaagaaac

SEQ ID NO: 2838 - RNA, 17 nt, Artificial Sequence
  Description of Artificial Sequence:  Enzymatic Nucleic Acid
cugaggaucgaccuaac

SEQ ID NO: 2839 - RNA, 17 nt, Artificial Sequence
  Description of Artificial Sequence:  Enzymatic Nucleic Acid
aucgaccuaacacaucu

SEQ ID NO: 2840 - RNA, 17 nt, Artificial Sequence
  Description of Artificial Sequence:  Enzymatic Nucleic Acid
uaacacaucugaaauac

SEQ ID NO: 2841 - RNA, 17 nt, Artificial Sequence
  Description of Artificial Sequence:  Enzymatic Nucleic Acid
ucugaaauacuaaggac

SEQ ID NO: 2842 - RNA, 17 nt, Artificial Sequence
  Description of Artificial Sequence:  Enzymatic Nucleic Acid
gaaauacuaaggaccuu

SEQ ID NO: 2843 - RNA, 17 nt, Artificial Sequence
  Description of Artificial Sequence:  Enzymatic Nucleic Acid
aaggaccuugacugugu

SEQ ID NO: 2844 - RNA, 17 nt, Artificial Sequence
  Description of Artificial Sequence:  Enzymatic Nucleic Acid
acacauguuagagcccu

SEQ ID NO: 2845 - RNA, 17 nt, Artificial Sequence
  Description of Artificial Sequence:  Enzymatic Nucleic Acid
cacauguuagagcccuu

SEQ ID NO: 2846 - RNA, 17 nt, Artificial Sequence
  Description of Artificial Sequence:  Enzymatic Nucleic Acid
agagcccuucugaaaaa

SEQ ID NO: 2847 - RNA, 17 nt, Artificial Sequence
  Description of Artificial Sequence:  Enzymatic Nucleic Acid
gagcccuucugaaaaag

SEQ ID NO: 2848 - RNA, 17 nt, Artificial Sequence
  Description of Artificial Sequence:  Enzymatic Nucleic Acid
gaaaaaguauccugcuu

SEQ ID NO: 2849 - RNA, 17 nt, Artificial Sequence
  Description of Artificial Sequence:  Enzymatic Nucleic Acid
aaaaguauccugcuucu

SEQ ID NO: 2850 - RNA, 17 nt, Artificial Sequence
  Description of Artificial Sequence:  Enzymatic Nucleic Acid
auccugcuucugauaug

SEQ ID NO: 2851 - RNA, 17 nt, Artificial Sequence
  Description of Artificial Sequence:  Enzymatic Nucleic Acid
uccugcuucugauaugc

SEQ ID NO: 2852 - RNA, 17 nt, Artificial Sequence
  Description of Artificial Sequence:  Enzymatic Nucleic Acid
cuucugauaugcaguuu

SEQ ID NO: 2853 - RNA, 17 nt, Artificial Sequence
  Description of Artificial Sequence:  Enzymatic Nucleic Acid
uaugcaguuuuccuuaa

SEQ ID NO: 2854 - RNA, 17 nt, Artificial Sequence
  Description of Artificial Sequence:  Enzymatic Nucleic Acid
augcaguuuuccuuaaa

SEQ ID NO: 2855 - RNA, 17 nt, Artificial Sequence
  Description of Artificial Sequence:  Enzymatic Nucleic Acid
ugcaguuuuccuuaaau

SEQ ID NO: 2856 - RNA, 17 nt, Artificial Sequence
  Description of Artificial Sequence:  Enzymatic Nucleic Acid
gcaguuuuccuuaaauu

SEQ ID NO: 2857 - RNA, 17 nt, Artificial Sequence
  Description of Artificial Sequence:  Enzymatic Nucleic Acid
guuuuccuuaaauuauc

SEQ ID NO: 2858 - RNA, 17 nt, Artificial Sequence
  Description of Artificial Sequence:  Enzymatic Nucleic Acid
uuuuccuuaaauuaucu

SEQ ID NO: 2859 - RNA, 17 nt, Artificial Sequence
  Description of Artificial Sequence:  Enzymatic Nucleic Acid
ccuuaaauuaucuaaaa

SEQ ID NO: 2860 - RNA, 17 nt, Artificial Sequence
  Description of Artificial Sequence:  Enzymatic Nucleic Acid
cuuaaauuaucuaaaau

SEQ ID NO: 2861 - RNA, 17 nt, Artificial Sequence
  Description of Artificial Sequence:  Enzymatic Nucleic Acid
uaaauuaucuaaaaucu

SEQ ID NO: 2862 - RNA, 17 nt, Artificial Sequence
  Description of Artificial Sequence:  Enzymatic Nucleic Acid
aauuaucuaaaaucugc

SEQ ID NO: 2863 - RNA, 17 nt, Artificial Sequence
  Description of Artificial Sequence:  Enzymatic Nucleic Acid
ucuaaaaucugcuaggg

SEQ ID NO: 2864 - RNA, 17 nt, Artificial Sequence
  Description of Artificial Sequence:  Enzymatic Nucleic Acid
aaucugcuagggaauau

SEQ ID NO: 2865 - RNA, 17 nt, Artificial Sequence
  Description of Artificial Sequence:  Enzymatic Nucleic Acid
uagggaauaucaauaga

SEQ ID NO: 2866 - RNA, 17 nt, Artificial Sequence
  Description of Artificial Sequence:  Enzymatic Nucleic Acid
gggaauaucaauagaua

SEQ ID NO: 2867 - RNA, 17 nt, Artificial Sequence
  Description of Artificial Sequence:  Enzymatic Nucleic Acid
auaucaauagauauuua

SEQ ID NO: 2868 - RNA, 17 nt, Artificial Sequence
  Description of Artificial Sequence:  Enzymatic Nucleic Acid
caauagauauuuaccuu

SEQ ID NO: 2869 - RNA, 17 nt, Artificial Sequence
  Description of Artificial Sequence:  Enzymatic Nucleic Acid
auagauauuuaccuuuu

SEQ ID NO: 2870 - RNA, 17 nt, Artificial Sequence
  Description of Artificial Sequence:  Enzymatic Nucleic Acid
uagauauuuaccuuuua

SEQ ID NO: 2871 - RNA, 17 nt, Artificial Sequence
  Description of Artificial Sequence:  Enzymatic Nucleic Acid
agauauuuaccuuuuau

SEQ ID NO: 2872 - RNA, 17 nt, Artificial Sequence
  Description of Artificial Sequence:  Enzymatic Nucleic Acid
auuuaccuuuuauuuua

SEQ ID NO: 2873 - RNA, 17 nt, Artificial Sequence
  Description of Artificial Sequence:  Enzymatic Nucleic Acid
uuuaccuuuuauuuuaa

SEQ ID NO: 2874 - RNA, 17 nt, Artificial Sequence
  Description of Artificial Sequence:  Enzymatic Nucleic Acid
uuaccuuuuauuuuaau

SEQ ID NO: 2875 - RNA, 17 nt, Artificial Sequence
  Description of Artificial Sequence:  Enzymatic Nucleic Acid
uaccuuuuauuuuaaug

SEQ ID NO: 2876 - RNA, 17 nt, Artificial Sequence
  Description of Artificial Sequence:  Enzymatic Nucleic Acid
ccuuuuauuuuaauguu

SEQ ID NO: 2877 - RNA, 17 nt, Artificial Sequence
  Description of Artificial Sequence:  Enzymatic Nucleic Acid
cuuuuauuuuaauguuu

SEQ ID NO: 2878 - RNA, 17 nt, Artificial Sequence
  Description of Artificial Sequence:  Enzymatic Nucleic Acid
uuuuauuuuaauguuuc

SEQ ID NO: 2879 - RNA, 17 nt, Artificial Sequence
  Description of Artificial Sequence:  Enzymatic Nucleic Acid
uuuauuuuaauguuucc

SEQ ID NO: 2880 - RNA, 17 nt, Artificial Sequence
  Description of Artificial Sequence:  Enzymatic Nucleic Acid
uuuaauguuuccuuuaa

SEQ ID NO: 2881 - RNA, 17 nt, Artificial Sequence
  Description of Artificial Sequence:  Enzymatic Nucleic Acid
uuaauguuuccuuuaau

SEQ ID NO: 2882 - RNA, 17 nt, Artificial Sequence
  Description of Artificial Sequence:  Enzymatic Nucleic Acid
uaauguuuccuuuaauu

SEQ ID NO: 2883 - RNA, 17 nt, Artificial Sequence
  Description of Artificial Sequence:  Enzymatic Nucleic Acid
uguuuccuuuaauuuuu

SEQ ID NO: 2884 - RNA, 17 nt, Artificial Sequence
  Description of Artificial Sequence:  Enzymatic Nucleic Acid
guuuccuuuaauuuuuu

SEQ ID NO: 2885 - RNA, 17 nt, Artificial Sequence
  Description of Artificial Sequence:  Enzymatic Nucleic Acid
uuuccuuuaauuuuuua

SEQ ID NO: 2886 - RNA, 17 nt, Artificial Sequence
  Description of Artificial Sequence:  Enzymatic Nucleic Acid
ccuuuaauuuuuuacua

SEQ ID NO: 2887 - RNA, 17 nt, Artificial Sequence
  Description of Artificial Sequence:  Enzymatic Nucleic Acid
cuuuaauuuuuuacuau

SEQ ID NO: 2888 - RNA, 17 nt, Artificial Sequence
  Description of Artificial Sequence:  Enzymatic Nucleic Acid
uuuaauuuuuuacuauu

SEQ ID NO: 2889 - RNA, 17 nt, Artificial Sequence
  Description of Artificial Sequence:  Enzymatic Nucleic Acid
uuaauuuuuuacuauuu

SEQ ID NO: 2890 - RNA, 17 nt, Artificial Sequence
  Description of Artificial Sequence:  Enzymatic Nucleic Acid
uaauuuuuuacuauuuu

SEQ ID NO: 2891 - RNA, 17 nt, Artificial Sequence
  Description of Artificial Sequence:  Enzymatic Nucleic Acid
aauuuuuuacuauuuuu

SEQ ID NO: 2892 - RNA, 17 nt, Artificial Sequence
  Description of Artificial Sequence:  Enzymatic Nucleic Acid
uuuuuacuauuuuuacu

SEQ ID NO: 2893 - RNA, 17 nt, Artificial Sequence
  Description of Artificial Sequence:  Enzymatic Nucleic Acid
uuuacuauuuuuacuaa

SEQ ID NO: 2894 - RNA, 17 nt, Artificial Sequence
  Description of Artificial Sequence:  Enzymatic Nucleic Acid
uuacuauuuuuacuaau

SEQ ID NO: 2895 - RNA, 17 nt, Artificial Sequence
  Description of Artificial Sequence:  Enzymatic Nucleic Acid
uacuauuuuuacuaauc

SEQ ID NO: 2896 - RNA, 17 nt, Artificial Sequence
  Description of Artificial Sequence:  Enzymatic Nucleic Acid
acuauuuuuacuaaucu

SEQ ID NO: 2897 - RNA, 17 nt, Artificial Sequence
  Description of Artificial Sequence:  Enzymatic Nucleic Acid
cuauuuuuacuaaucuu

SEQ ID NO: 2898 - RNA, 17 nt, Artificial Sequence
  Description of Artificial Sequence:  Enzymatic Nucleic Acid
uuuuuacuaaucuuucu

SEQ ID NO: 2899 - RNA, 17 nt, Artificial Sequence
  Description of Artificial Sequence:  Enzymatic Nucleic Acid
uuacuaaucuuucugca

SEQ ID NO: 2900 - RNA, 17 nt, Artificial Sequence
  Description of Artificial Sequence:  Enzymatic Nucleic Acid
acuaaucuuucugcaga

SEQ ID NO: 2901 - RNA, 17 nt, Artificial Sequence
  Description of Artificial Sequence:  Enzymatic Nucleic Acid
cuaaucuuucugcagaa

SEQ ID NO: 2902 - RNA, 17 nt, Artificial Sequence
  Description of Artificial Sequence:  Enzymatic Nucleic Acid
uaaucuuucugcagaaa

SEQ ID NO: 2903 - RNA, 17 nt, Artificial Sequence
  Description of Artificial Sequence:  Enzymatic Nucleic Acid
agaaagguuuucuucuu

SEQ ID NO: 2904 - RNA, 17 nt, Artificial Sequence
  Description of Artificial Sequence:  Enzymatic Nucleic Acid
gaaagguuuucuucuuu

SEQ ID NO: 2905 - RNA, 17 nt, Artificial Sequence
  Description of Artificial Sequence:  Enzymatic Nucleic Acid
aaagguuuucuucuuuu

SEQ ID NO: 2906 - RNA, 17 nt, Artificial Sequence
  Description of Artificial Sequence:  Enzymatic Nucleic Acid
aagguuuucuucuuuuu

SEQ ID NO: 2907 - RNA, 17 nt, Artificial Sequence
  Description of Artificial Sequence:  Enzymatic Nucleic Acid
gguuuucuucuuuuugc

SEQ ID NO: 2908 - RNA, 17 nt, Artificial Sequence
  Description of Artificial Sequence:  Enzymatic Nucleic Acid
guuuucuucuuuuugcu

SEQ ID NO: 2909 - RNA, 17 nt, Artificial Sequence
  Description of Artificial Sequence:  Enzymatic Nucleic Acid
uuucuucuuuuugcuuc

SEQ ID NO: 2910 - RNA, 17 nt, Artificial Sequence
  Description of Artificial Sequence:  Enzymatic Nucleic Acid
uucuucuuuuugcuuca

SEQ ID NO: 2911 - RNA, 17 nt, Artificial Sequence
  Description of Artificial Sequence:  Enzymatic Nucleic Acid
ucuucuuuuugcuucaa

SEQ ID NO: 2912 - RNA, 17 nt, Artificial Sequence
  Description of Artificial Sequence:  Enzymatic Nucleic Acid
cuucuuuuugcuucaaa

SEQ ID NO: 2913 - RNA, 17 nt, Artificial Sequence
  Description of Artificial Sequence:  Enzymatic Nucleic Acid
uuuuugcuucaaaaaca

SEQ ID NO: 2914 - RNA, 17 nt, Artificial Sequence
  Description of Artificial Sequence:  Enzymatic Nucleic Acid
uuuugcuucaaaaacau

SEQ ID NO: 2915 - RNA, 17 nt, Artificial Sequence
  Description of Artificial Sequence:  Enzymatic Nucleic Acid
aaaaacauucuuacauu

SEQ ID NO: 2916 - RNA, 17 nt, Artificial Sequence
  Description of Artificial Sequence:  Enzymatic Nucleic Acid
aaaacauucuuacauuu

SEQ ID NO: 2917 - RNA, 17 nt, Artificial Sequence
  Description of Artificial Sequence:  Enzymatic Nucleic Acid
aacauucuuacauuuua

SEQ ID NO: 2918 - RNA, 17 nt, Artificial Sequence
  Description of Artificial Sequence:  Enzymatic Nucleic Acid
acauucuuacauuuuac

SEQ ID NO: 2919 - RNA, 17 nt, Artificial Sequence
  Description of Artificial Sequence:  Enzymatic Nucleic Acid
ucuuacauuuuacuuuu

SEQ ID NO: 2920 - RNA, 17 nt, Artificial Sequence
  Description of Artificial Sequence:  Enzymatic Nucleic Acid
cuuacauuuuacuuuuu

SEQ ID NO: 2921 - RNA, 17 nt, Artificial Sequence
  Description of Artificial Sequence:  Enzymatic Nucleic Acid
uuacauuuuacuuuuuc

SEQ ID NO: 2922 - RNA, 17 nt, Artificial Sequence
  Description of Artificial Sequence:  Enzymatic Nucleic Acid
uacauuuuacuuuuucc

SEQ ID NO: 2923 - RNA, 17 nt, Artificial Sequence
  Description of Artificial Sequence:  Enzymatic Nucleic Acid
auuuuacuuuuuccugg

SEQ ID NO: 2924 - RNA, 17 nt, Artificial Sequence
  Description of Artificial Sequence:  Enzymatic Nucleic Acid
uuuuacuuuuuccuggc

SEQ ID NO: 2925 - RNA, 17 nt, Artificial Sequence
  Description of Artificial Sequence:  Enzymatic Nucleic Acid
uuuacuuuuuccuggcu

SEQ ID NO: 2926 - RNA, 17 nt, Artificial Sequence
  Description of Artificial Sequence:  Enzymatic Nucleic Acid
uuacuuuuuccuggcuc

SEQ ID NO: 2927 - RNA, 17 nt, Artificial Sequence
  Description of Artificial Sequence:  Enzymatic Nucleic Acid
uacuuuuuccuggcuca

SEQ ID NO: 2928 - RNA, 17 nt, Artificial Sequence
  Description of Artificial Sequence:  Enzymatic Nucleic Acid
uccuggcucaucucuuu

SEQ ID NO: 2929 - RNA, 17 nt, Artificial Sequence
  Description of Artificial Sequence:  Enzymatic Nucleic Acid
uggcucaucucuuuauu

SEQ ID NO: 2930 - RNA, 17 nt, Artificial Sequence
  Description of Artificial Sequence:  Enzymatic Nucleic Acid
gcucaucucuuuauucu

SEQ ID NO: 2931 - RNA, 17 nt, Artificial Sequence
  Description of Artificial Sequence:  Enzymatic Nucleic Acid
ucaucucuuuauucuuu

SEQ ID NO: 2932 - RNA, 17 nt, Artificial Sequence
  Description of Artificial Sequence:  Enzymatic Nucleic Acid
caucucuuuauucuuuu

SEQ ID NO: 2933 - RNA, 17 nt, Artificial Sequence
  Description of Artificial Sequence:  Enzymatic Nucleic Acid
aucucuuuauucuuuuu

SEQ ID NO: 2934 - RNA, 17 nt, Artificial Sequence
  Description of Artificial Sequence:  Enzymatic Nucleic Acid
cucuuuauucuuuuuuu

SEQ ID NO: 2935 - RNA, 17 nt, Artificial Sequence
  Description of Artificial Sequence:  Enzymatic Nucleic Acid
ucuuuauucuuuuuuuu

SEQ ID NO: 2936 - RNA, 17 nt, Artificial Sequence
  Description of Artificial Sequence:  Enzymatic Nucleic Acid
uuuauucuuuuuuuuuu

SEQ ID NO: 2937 - RNA, 17 nt, Artificial Sequence
  Description of Artificial Sequence:  Enzymatic Nucleic Acid
uuauucuuuuuuuuuuu

SEQ ID NO: 2938 - RNA, 17 nt, Artificial Sequence
  Description of Artificial Sequence:  Enzymatic Nucleic Acid
uauucuuuuuuuuuuuu

SEQ ID NO: 2939 - RNA, 17 nt, Artificial Sequence
  Description of Artificial Sequence:  Enzymatic Nucleic Acid
auucuuuuuuuuuuuuu

SEQ ID NO: 2940 - RNA, 17 nt, Artificial Sequence
  Description of Artificial Sequence:  Enzymatic Nucleic Acid
uucuuuuuuuuuuuuuu

SEQ ID NO: 2941 - RNA, 17 nt, Artificial Sequence
  Description of Artificial Sequence:  Enzymatic Nucleic Acid
ucuuuuuuuuuuuuuua

SEQ ID NO: 2942 - RNA, 17 nt, Artificial Sequence
  Description of Artificial Sequence:  Enzymatic Nucleic Acid
cuuuuuuuuuuuuuuaa

SEQ ID NO: 2943 - RNA, 17 nt, Artificial Sequence
  Description of Artificial Sequence:  Enzymatic Nucleic Acid
uuuuuuuuuuuuuuaaa

SEQ ID NO: 2944 - RNA, 17 nt, Artificial Sequence
  Description of Artificial Sequence:  Enzymatic Nucleic Acid
uuuuuuuuuuuuuaaag

SEQ ID NO: 2945 - RNA, 17 nt, Artificial Sequence
  Description of Artificial Sequence:  Enzymatic Nucleic Acid
uuuuuuuuuuuuaaaga

SEQ ID NO: 2946 - RNA, 17 nt, Artificial Sequence
  Description of Artificial Sequence:  Enzymatic Nucleic Acid
uuuuuuuuuuuaaagac

SEQ ID NO: 2947 - RNA, 17 nt, Artificial Sequence
  Description of Artificial Sequence:  Enzymatic Nucleic Acid
uuuuuuuuuuaaagaca

SEQ ID NO: 2948 - RNA, 17 nt, Artificial Sequence
  Description of Artificial Sequence:  Enzymatic Nucleic Acid
uuuuuuuuuaaagacag

SEQ ID NO: 2949 - RNA, 17 nt, Artificial Sequence
  Description of Artificial Sequence:  Enzymatic Nucleic Acid
uuuuuuuuaaagacaga

SEQ ID NO: 2950 - RNA, 17 nt, Artificial Sequence
  Description of Artificial Sequence:  Enzymatic Nucleic Acid
gacagagucucgcucug

SEQ ID NO: 2951 - RNA, 17 nt, Artificial Sequence
  Description of Artificial Sequence:  Enzymatic Nucleic Acid
cagagucucgcucuguu

SEQ ID NO: 2952 - RNA, 17 nt, Artificial Sequence
  Description of Artificial Sequence:  Enzymatic Nucleic Acid
gucucgcucuguugccc

SEQ ID NO: 2953 - RNA, 17 nt, Artificial Sequence
  Description of Artificial Sequence:  Enzymatic Nucleic Acid
cgcucuguugcccaggc

SEQ ID NO: 2954 - RNA, 17 nt, Artificial Sequence
  Description of Artificial Sequence:  Enzymatic Nucleic Acid
gacacagucuuggcuca

SEQ ID NO: 2955 - RNA, 17 nt, Artificial Sequence
  Description of Artificial Sequence:  Enzymatic Nucleic Acid
cacagucuuggcucacu

SEQ ID NO: 2956 - RNA, 17 nt, Artificial Sequence
  Description of Artificial Sequence:  Enzymatic Nucleic Acid
ucuuggcucacugcaac

SEQ ID NO: 2957 - RNA, 17 nt, Artificial Sequence
  Description of Artificial Sequence:  Enzymatic Nucleic Acid
cugcaacuucugccucu

SEQ ID NO: 2958 - RNA, 17 nt, Artificial Sequence
  Description of Artificial Sequence:  Enzymatic Nucleic Acid
ugcaacuucugccucuu

SEQ ID NO: 2959 - RNA, 17 nt, Artificial Sequence
  Description of Artificial Sequence:  Enzymatic Nucleic Acid
uucugccucuuggguuc

SEQ ID NO: 2960 - RNA, 17 nt, Artificial Sequence
  Description of Artificial Sequence:  Enzymatic Nucleic Acid
cugccucuuggguucaa

SEQ ID NO: 2961 - RNA, 17 nt, Artificial Sequence
  Description of Artificial Sequence:  Enzymatic Nucleic Acid
ucuuggguucaagugau

SEQ ID NO: 2962 - RNA, 17 nt, Artificial Sequence
  Description of Artificial Sequence:  Enzymatic Nucleic Acid
cuuggguucaagugauu

SEQ ID NO: 2963 - RNA, 17 nt, Artificial Sequence
  Description of Artificial Sequence:  Enzymatic Nucleic Acid
caagugauucuccugcc

SEQ ID NO: 2964 - RNA, 17 nt, Artificial Sequence
  Description of Artificial Sequence:  Enzymatic Nucleic Acid
aagugauucuccugccu

SEQ ID NO: 2965 - RNA, 17 nt, Artificial Sequence
  Description of Artificial Sequence:  Enzymatic Nucleic Acid
gugauucuccugccuca

SEQ ID NO: 2966 - RNA, 17 nt, Artificial Sequence
  Description of Artificial Sequence:  Enzymatic Nucleic Acid
uccugccucagccuccu

SEQ ID NO: 2967 - RNA, 17 nt, Artificial Sequence
  Description of Artificial Sequence:  Enzymatic Nucleic Acid
cucagccuccugaguag

SEQ ID NO: 2968 - RNA, 17 nt, Artificial Sequence
  Description of Artificial Sequence:  Enzymatic Nucleic Acid
uccugaguagcuggauu

SEQ ID NO: 2969 - RNA, 17 nt, Artificial Sequence
  Description of Artificial Sequence:  Enzymatic Nucleic Acid
agcuggauuacaggcau

SEQ ID NO: 2970 - RNA, 17 nt, Artificial Sequence
  Description of Artificial Sequence:  Enzymatic Nucleic Acid
gcuggauuacaggcaug

SEQ ID NO: 2971 - RNA, 17 nt, Artificial Sequence
  Description of Artificial Sequence:  Enzymatic Nucleic Acid
acccaacuaauuuuugu

SEQ ID NO: 2972 - RNA, 17 nt, Artificial Sequence
  Description of Artificial Sequence:  Enzymatic Nucleic Acid
caacuaauuuuuguguu

SEQ ID NO: 2973 - RNA, 17 nt, Artificial Sequence
  Description of Artificial Sequence:  Enzymatic Nucleic Acid
aacuaauuuuuguguuu

SEQ ID NO: 2974 - RNA, 17 nt, Artificial Sequence
  Description of Artificial Sequence:  Enzymatic Nucleic Acid
acuaauuuuuguguuuu

SEQ ID NO: 2975 - RNA, 17 nt, Artificial Sequence
  Description of Artificial Sequence:  Enzymatic Nucleic Acid
cuaauuuuuguguuuuu

SEQ ID NO: 2976 - RNA, 17 nt, Artificial Sequence
  Description of Artificial Sequence:  Enzymatic Nucleic Acid
uuuuguguuuuuaauaa

SEQ ID NO: 2977 - RNA, 17 nt, Artificial Sequence
  Description of Artificial Sequence:  Enzymatic Nucleic Acid
uuuguguuuuuaauaaa

SEQ ID NO: 2978 - RNA, 17 nt, Artificial Sequence
  Description of Artificial Sequence:  Enzymatic Nucleic Acid
uuguguuuuuaauaaag

SEQ ID NO: 2979 - RNA, 17 nt, Artificial Sequence
  Description of Artificial Sequence:  Enzymatic Nucleic Acid
uguguuuuuaauaaaga

SEQ ID NO: 2980 - RNA, 17 nt, Artificial Sequence
  Description of Artificial Sequence:  Enzymatic Nucleic Acid
guguuuuuaauaaagac

SEQ ID NO: 2981 - RNA, 17 nt, Artificial Sequence
  Description of Artificial Sequence:  Enzymatic Nucleic Acid
uuuuuaauaaagacagg

SEQ ID NO: 2982 - RNA, 17 nt, Artificial Sequence
  Description of Artificial Sequence:  Enzymatic Nucleic Acid
gacaggguuucaccaug

SEQ ID NO: 2983 - RNA, 17 nt, Artificial Sequence
  Description of Artificial Sequence:  Enzymatic Nucleic Acid
acaggguuucaccaugu

SEQ ID NO: 2984 - RNA, 17 nt, Artificial Sequence
  Description of Artificial Sequence:  Enzymatic Nucleic Acid
caggguuucaccauguu

SEQ ID NO: 2985 - RNA, 17 nt, Artificial Sequence
  Description of Artificial Sequence:  Enzymatic Nucleic Acid
caccauguuggccaggc

SEQ ID NO: 2986 - RNA, 17 nt, Artificial Sequence
  Description of Artificial Sequence:  Enzymatic Nucleic Acid
aggcuggucucaaacuc

SEQ ID NO: 2987 - RNA, 17 nt, Artificial Sequence
  Description of Artificial Sequence:  Enzymatic Nucleic Acid
gcuggucucaaacuccu

SEQ ID NO: 2988 - RNA, 17 nt, Artificial Sequence
  Description of Artificial Sequence:  Enzymatic Nucleic Acid
cucaaacuccugaccuc

SEQ ID NO: 2989 - RNA, 17 nt, Artificial Sequence
  Description of Artificial Sequence:  Enzymatic Nucleic Acid
ccugaccucaaguaauc

SEQ ID NO: 2990 - RNA, 17 nt, Artificial Sequence
  Description of Artificial Sequence:  Enzymatic Nucleic Acid
ccucaaguaauccaccu

SEQ ID NO: 2991 - RNA, 17 nt, Artificial Sequence
  Description of Artificial Sequence:  Enzymatic Nucleic Acid
caaguaauccaccugcc

SEQ ID NO: 2992 - RNA, 17 nt, Artificial Sequence
  Description of Artificial Sequence:  Enzymatic Nucleic Acid
accugccucggccuccc

SEQ ID NO: 2993 - RNA, 17 nt, Artificial Sequence
  Description of Artificial Sequence:  Enzymatic Nucleic Acid
cucggccucccaaagug

SEQ ID NO: 2994 - RNA, 17 nt, Artificial Sequence
  Description of Artificial Sequence:  Enzymatic Nucleic Acid
gcugggauuacagggau

SEQ ID NO: 2995 - RNA, 17 nt, Artificial Sequence
  Description of Artificial Sequence:  Enzymatic Nucleic Acid
cugggauuacagggaug

SEQ ID NO: 2996 - RNA, 17 nt, Artificial Sequence
  Description of Artificial Sequence:  Enzymatic Nucleic Acid
cccagccucaucucuuu

SEQ ID NO: 2997 - RNA, 17 nt, Artificial Sequence
  Description of Artificial Sequence:  Enzymatic Nucleic Acid
agccucaucucuuuguu

SEQ ID NO: 2998 - RNA, 17 nt, Artificial Sequence
  Description of Artificial Sequence:  Enzymatic Nucleic Acid
ccucaucucuuuguucu

SEQ ID NO: 2999 - RNA, 17 nt, Artificial Sequence
  Description of Artificial Sequence:  Enzymatic Nucleic Acid
ucaucucuuuguucuaa

SEQ ID NO: 3000 - RNA, 17 nt, Artificial Sequence
  Description of Artificial Sequence:  Enzymatic Nucleic Acid
caucucuuuguucuaaa

SEQ ID NO: 3001 - RNA, 17 nt, Artificial Sequence
  Description of Artificial Sequence:  Enzymatic Nucleic Acid
cucuuuguucuaaagau

SEQ ID NO: 3002 - RNA, 17 nt, Artificial Sequence
  Description of Artificial Sequence:  Enzymatic Nucleic Acid
ucuuuguucuaaagaug

SEQ ID NO: 3003 - RNA, 17 nt, Artificial Sequence
  Description of Artificial Sequence:  Enzymatic Nucleic Acid
uuuguucuaaagaugga

SEQ ID NO: 3004 - RNA, 17 nt, Artificial Sequence
  Description of Artificial Sequence:  Enzymatic Nucleic Acid
ccccaaauuuucuuuuu

SEQ ID NO: 3005 - RNA, 17 nt, Artificial Sequence
  Description of Artificial Sequence:  Enzymatic Nucleic Acid
cccaaauuuucuuuuua

SEQ ID NO: 3006 - RNA, 17 nt, Artificial Sequence
  Description of Artificial Sequence:  Enzymatic Nucleic Acid
ccaaauuuucuuuuuau

SEQ ID NO: 3007 - RNA, 17 nt, Artificial Sequence
  Description of Artificial Sequence:  Enzymatic Nucleic Acid
caaauuuucuuuuuaua

SEQ ID NO: 3008 - RNA, 17 nt, Artificial Sequence
  Description of Artificial Sequence:  Enzymatic Nucleic Acid
aauuuucuuuuuauacu

SEQ ID NO: 3009 - RNA, 17 nt, Artificial Sequence
  Description of Artificial Sequence:  Enzymatic Nucleic Acid
auuuucuuuuuauacua

SEQ ID NO: 3010 - RNA, 17 nt, Artificial Sequence
  Description of Artificial Sequence:  Enzymatic Nucleic Acid
uuuucuuuuuauacuau

SEQ ID NO: 3011 - RNA, 17 nt, Artificial Sequence
  Description of Artificial Sequence:  Enzymatic Nucleic Acid
uuucuuuuuauacuauu

SEQ ID NO: 3012 - RNA, 17 nt, Artificial Sequence
  Description of Artificial Sequence:  Enzymatic Nucleic Acid
uucuuuuuauacuauua

SEQ ID NO: 3013 - RNA, 17 nt, Artificial Sequence
  Description of Artificial Sequence:  Enzymatic Nucleic Acid
cuuuuuauacuauuaau

SEQ ID NO: 3014 - RNA, 17 nt, Artificial Sequence
  Description of Artificial Sequence:  Enzymatic Nucleic Acid
uuuauacuauuaaugaa

SEQ ID NO: 3015 - RNA, 17 nt, Artificial Sequence
  Description of Artificial Sequence:  Enzymatic Nucleic Acid
uauacuauuaaugaauc

SEQ ID NO: 3016 - RNA, 17 nt, Artificial Sequence
  Description of Artificial Sequence:  Enzymatic Nucleic Acid
auacuauuaaugaauca

SEQ ID NO: 3017 - RNA, 17 nt, Artificial Sequence
  Description of Artificial Sequence:  Enzymatic Nucleic Acid
uaaugaaucaaucaauu

SEQ ID NO: 3018 - RNA, 17 nt, Artificial Sequence
  Description of Artificial Sequence:  Enzymatic Nucleic Acid
gaaucaaucaauucaua

SEQ ID NO: 3019 - RNA, 17 nt, Artificial Sequence
  Description of Artificial Sequence:  Enzymatic Nucleic Acid
caaucaauucauaucua

SEQ ID NO: 3020 - RNA, 17 nt, Artificial Sequence
  Description of Artificial Sequence:  Enzymatic Nucleic Acid
aaucaauucauaucuau

SEQ ID NO: 3021 - RNA, 17 nt, Artificial Sequence
  Description of Artificial Sequence:  Enzymatic Nucleic Acid
caauucauaucuauuua

SEQ ID NO: 3022 - RNA, 17 nt, Artificial Sequence
  Description of Artificial Sequence:  Enzymatic Nucleic Acid
auucauaucuauuuauu

SEQ ID NO: 3023 - RNA, 17 nt, Artificial Sequence
  Description of Artificial Sequence:  Enzymatic Nucleic Acid
ucauaucuauuuauuaa

SEQ ID NO: 3024 - RNA, 17 nt, Artificial Sequence
  Description of Artificial Sequence:  Enzymatic Nucleic Acid
auaucuauuuauuaaau

SEQ ID NO: 3025 - RNA, 17 nt, Artificial Sequence
  Description of Artificial Sequence:  Enzymatic Nucleic Acid
uaucuauuuauuaaauu

SEQ ID NO: 3026 - RNA, 17 nt, Artificial Sequence
  Description of Artificial Sequence:  Enzymatic Nucleic Acid
aucuauuuauuaaauuu

SEQ ID NO: 3027 - RNA, 17 nt, Artificial Sequence
  Description of Artificial Sequence:  Enzymatic Nucleic Acid
cuauuuauuaaauuucu

SEQ ID NO: 3028 - RNA, 17 nt, Artificial Sequence
  Description of Artificial Sequence:  Enzymatic Nucleic Acid
uauuuauuaaauuucua

SEQ ID NO: 3029 - RNA, 17 nt, Artificial Sequence
  Description of Artificial Sequence:  Enzymatic Nucleic Acid
uauuaaauuucuaccgc

SEQ ID NO: 3030 - RNA, 17 nt, Artificial Sequence
  Description of Artificial Sequence:  Enzymatic Nucleic Acid
auuaaauuucuaccgcu

SEQ ID NO: 3031 - RNA, 17 nt, Artificial Sequence
  Description of Artificial Sequence:  Enzymatic Nucleic Acid
uuaaauuucuaccgcuu

SEQ ID NO: 3032 - RNA, 17 nt, Artificial Sequence
  Description of Artificial Sequence:  Enzymatic Nucleic Acid
aaauuucuaccgcuuuu

SEQ ID NO: 3033 - RNA, 17 nt, Artificial Sequence
  Description of Artificial Sequence:  Enzymatic Nucleic Acid
cuaccgcuuuuaggcca

SEQ ID NO: 3034 - RNA, 17 nt, Artificial Sequence
  Description of Artificial Sequence:  Enzymatic Nucleic Acid
uaccgcuuuuaggccaa

SEQ ID NO: 3035 - RNA, 17 nt, Artificial Sequence
  Description of Artificial Sequence:  Enzymatic Nucleic Acid
accgcuuuuaggccaaa

SEQ ID NO: 3036 - RNA, 17 nt, Artificial Sequence
  Description of Artificial Sequence:  Enzymatic Nucleic Acid
ccgcuuuuaggccaaaa

SEQ ID NO: 3037 - RNA, 17 nt, Artificial Sequence
  Description of Artificial Sequence:  Enzymatic Nucleic Acid
aaaaauguaagaucguu

SEQ ID NO: 3038 - RNA, 17 nt, Artificial Sequence
  Description of Artificial Sequence:  Enzymatic Nucleic Acid
uguaagaucguucucug

SEQ ID NO: 3039 - RNA, 17 nt, Artificial Sequence
  Description of Artificial Sequence:  Enzymatic Nucleic Acid
aagaucguucucugccu

SEQ ID NO: 3040 - RNA, 17 nt, Artificial Sequence
  Description of Artificial Sequence:  Enzymatic Nucleic Acid
agaucguucucugccuc

SEQ ID NO: 3041 - RNA, 17 nt, Artificial Sequence
  Description of Artificial Sequence:  Enzymatic Nucleic Acid
aucguucucugccucac

SEQ ID NO: 3042 - RNA, 17 nt, Artificial Sequence
  Description of Artificial Sequence:  Enzymatic Nucleic Acid
cucugccucacauagcu

SEQ ID NO: 3043 - RNA, 17 nt, Artificial Sequence
  Description of Artificial Sequence:  Enzymatic Nucleic Acid
ccucacauagcuuacaa

SEQ ID NO: 3044 - RNA, 17 nt, Artificial Sequence
  Description of Artificial Sequence:  Enzymatic Nucleic Acid
acauagcuuacaagcca

SEQ ID NO: 3045 - RNA, 17 nt, Artificial Sequence
  Description of Artificial Sequence:  Enzymatic Nucleic Acid
cauagcuuacaagccag

SEQ ID NO: 3046 - RNA, 17 nt, Artificial Sequence
  Description of Artificial Sequence:  Enzymatic Nucleic Acid
ggagaaauaugguacuc

SEQ ID NO: 3047 - RNA, 17 nt, Artificial Sequence
  Description of Artificial Sequence:  Enzymatic Nucleic Acid
aauaugguacucauuaa

SEQ ID NO: 3048 - RNA, 17 nt, Artificial Sequence
  Description of Artificial Sequence:  Enzymatic Nucleic Acid
augguacucauuaaaaa

SEQ ID NO: 3049 - RNA, 17 nt, Artificial Sequence
  Description of Artificial Sequence:  Enzymatic Nucleic Acid
guacucauuaaaaaaaa

SEQ ID NO: 3050 - RNA, 17 nt, Artificial Sequence
  Description of Artificial Sequence:  Enzymatic Nucleic Acid
uacucauuaaaaaaaaa

SEQ ID NO: 3051 - RNA, 17 nt, Artificial Sequence
  Description of Artificial Sequence:  Enzymatic Nucleic Acid
ggcggcgcaguuugcuc

SEQ ID NO: 3052 - RNA, 17 nt, Artificial Sequence
  Description of Artificial Sequence:  Enzymatic Nucleic Acid
caguuugcucauacuuu

SEQ ID NO: 3053 - RNA, 17 nt, Artificial Sequence
  Description of Artificial Sequence:  Enzymatic Nucleic Acid
guuugcucauacuuugu

SEQ ID NO: 3054 - RNA, 17 nt, Artificial Sequence
  Description of Artificial Sequence:  Enzymatic Nucleic Acid
gcucauacuuugugacu

SEQ ID NO: 3055 - RNA, 17 nt, Artificial Sequence
  Description of Artificial Sequence:  Enzymatic Nucleic Acid
uuugugacuugcgguca

SEQ ID NO: 3056 - RNA, 17 nt, Artificial Sequence
  Description of Artificial Sequence:  Enzymatic Nucleic Acid
uugcggucacaguggca

SEQ ID NO: 3057 - RNA, 17 nt, Artificial Sequence
  Description of Artificial Sequence:  Enzymatic Nucleic Acid
gcggucacaguggcauu

SEQ ID NO: 3058 - RNA, 17 nt, Artificial Sequence
  Description of Artificial Sequence:  Enzymatic Nucleic Acid
acaguggcauucagcuc

SEQ ID NO: 3059 - RNA, 17 nt, Artificial Sequence
  Description of Artificial Sequence:  Enzymatic Nucleic Acid
uggcauucagcuccaca

SEQ ID NO: 3060 - RNA, 17 nt, Artificial Sequence
  Description of Artificial Sequence:  Enzymatic Nucleic Acid
cauucagcuccacacuu

SEQ ID NO: 3061 - RNA, 17 nt, Artificial Sequence
  Description of Artificial Sequence:  Enzymatic Nucleic Acid
uucagcuccacacuugg

SEQ ID NO: 3062 - RNA, 17 nt, Artificial Sequence
  Description of Artificial Sequence:  Enzymatic Nucleic Acid
ucagcuccacacuuggu

SEQ ID NO: 3063 - RNA, 17 nt, Artificial Sequence
  Description of Artificial Sequence:  Enzymatic Nucleic Acid
agcuccacacuugguag

SEQ ID NO: 3064 - RNA, 17 nt, Artificial Sequence
  Description of Artificial Sequence:  Enzymatic Nucleic Acid
cuccacacuugguagaa

SEQ ID NO: 3065 - RNA, 17 nt, Artificial Sequence
  Description of Artificial Sequence:  Enzymatic Nucleic Acid
gguagaaccacaggcac

SEQ ID NO: 3066 - RNA, 17 nt, Artificial Sequence
  Description of Artificial Sequence:  Enzymatic Nucleic Acid
guagaaccacaggcacg

SEQ ID NO: 3067 - RNA, 17 nt, Artificial Sequence
  Description of Artificial Sequence:  Enzymatic Nucleic Acid
agaaccacaggcacgac

SEQ ID NO: 3068 - RNA, 17 nt, Artificial Sequence
  Description of Artificial Sequence:  Enzymatic Nucleic Acid
ccacaggcacgacaagc

SEQ ID NO: 3069 - RNA, 17 nt, Artificial Sequence
  Description of Artificial Sequence:  Enzymatic Nucleic Acid
ggcacgacaagcauaga

SEQ ID NO: 3070 - RNA, 17 nt, Artificial Sequence
  Description of Artificial Sequence:  Enzymatic Nucleic Acid
cgacaagcauagaaaca

SEQ ID NO: 3071 - RNA, 17 nt, Artificial Sequence
  Description of Artificial Sequence:  Enzymatic Nucleic Acid
auagaaacauccuaaac

SEQ ID NO: 3072 - RNA, 17 nt, Artificial Sequence
  Description of Artificial Sequence:  Enzymatic Nucleic Acid
gaaacauccuaaacaau

SEQ ID NO: 3073 - RNA, 17 nt, Artificial Sequence
  Description of Artificial Sequence:  Enzymatic Nucleic Acid
aaacauccuaaacaauc

SEQ ID NO: 3074 - RNA, 17 nt, Artificial Sequence
  Description of Artificial Sequence:  Enzymatic Nucleic Acid
uccuaaacaaucuucau

SEQ ID NO: 3075 - RNA, 17 nt, Artificial Sequence
  Description of Artificial Sequence:  Enzymatic Nucleic Acid
aaacaaucuucaucgag

SEQ ID NO: 3076 - RNA, 17 nt, Artificial Sequence
  Description of Artificial Sequence:  Enzymatic Nucleic Acid
caaucuucaucgaggca

SEQ ID NO: 3077 - RNA, 17 nt, Artificial Sequence
  Description of Artificial Sequence:  Enzymatic Nucleic Acid
aucgaggcaucgagguc

SEQ ID NO: 3078 - RNA, 17 nt, Artificial Sequence
  Description of Artificial Sequence:  Enzymatic Nucleic Acid
ucgagguccaucccaau

SEQ ID NO: 3079 - RNA, 17 nt, Artificial Sequence
  Description of Artificial Sequence:  Enzymatic Nucleic Acid
cgagguccaucccaaua

SEQ ID NO: 3080 - RNA, 17 nt, Artificial Sequence
  Description of Artificial Sequence:  Enzymatic Nucleic Acid
gguccaucccaauaaaa

SEQ ID NO: 3081 - RNA, 17 nt, Artificial Sequence
  Description of Artificial Sequence:  Enzymatic Nucleic Acid
guccaucccaauaaaaa

SEQ ID NO: 3082 - RNA, 17 nt, Artificial Sequence
  Description of Artificial Sequence:  Enzymatic Nucleic Acid
uccaucccaauaaaaau

SEQ ID NO: 3083 - RNA, 17 nt, Artificial Sequence
  Description of Artificial Sequence:  Enzymatic Nucleic Acid
uaaaaaucaggagaccc

SEQ ID NO: 3084 - RNA, 17 nt, Artificial Sequence
  Description of Artificial Sequence:  Enzymatic Nucleic Acid
caggagacccuggcuau

SEQ ID NO: 3085 - RNA, 17 nt, Artificial Sequence
  Description of Artificial Sequence:  Enzymatic Nucleic Acid
aggagacccuggcuauc

SEQ ID NO: 3086 - RNA, 17 nt, Artificial Sequence
  Description of Artificial Sequence:  Enzymatic Nucleic Acid
ggagacccuggcuauca

SEQ ID NO: 3087 - RNA, 17 nt, Artificial Sequence
  Description of Artificial Sequence:  Enzymatic Nucleic Acid
acccuggcuaucauaga

SEQ ID NO: 3088 - RNA, 17 nt, Artificial Sequence
  Description of Artificial Sequence:  Enzymatic Nucleic Acid
uggcuaucauagaccuu

SEQ ID NO: 3089 - RNA, 17 nt, Artificial Sequence
  Description of Artificial Sequence:  Enzymatic Nucleic Acid
ucauagaccuuagucuu

SEQ ID NO: 3090 - RNA, 17 nt, Artificial Sequence
  Description of Artificial Sequence:  Enzymatic Nucleic Acid
cauagaccuuagucuuc

SEQ ID NO: 3091 - RNA, 17 nt, Artificial Sequence
  Description of Artificial Sequence:  Enzymatic Nucleic Acid
ccuuagucuucgcuggu

SEQ ID NO: 3092 - RNA, 17 nt, Artificial Sequence
  Description of Artificial Sequence:  Enzymatic Nucleic Acid
gucuucgcugguauacu

SEQ ID NO: 3093 - RNA, 17 nt, Artificial Sequence
  Description of Artificial Sequence:  Enzymatic Nucleic Acid
ugguauacucgcugucu

SEQ ID NO: 3094 - RNA, 17 nt, Artificial Sequence
  Description of Artificial Sequence:  Enzymatic Nucleic Acid
auacucgcugucuguca

SEQ ID NO: 3095 - RNA, 17 nt, Artificial Sequence
  Description of Artificial Sequence:  Enzymatic Nucleic Acid
ucgcugucugucaacca

SEQ ID NO: 3096 - RNA, 17 nt, Artificial Sequence
  Description of Artificial Sequence:  Enzymatic Nucleic Acid
ugucugucaaccagcgg

SEQ ID NO: 3097 - RNA, 17 nt, Artificial Sequence
  Description of Artificial Sequence:  Enzymatic Nucleic Acid
cugucaaccagcgguug

SEQ ID NO: 3098 - RNA, 17 nt, Artificial Sequence
  Description of Artificial Sequence:  Enzymatic Nucleic Acid
ugucaaccagcgguuga

SEQ ID NO: 3099 - RNA, 17 nt, Artificial Sequence
  Description of Artificial Sequence:  Enzymatic Nucleic Acid
cgguugacuuuuuuuaa

SEQ ID NO: 3100 - RNA, 17 nt, Artificial Sequence
  Description of Artificial Sequence:  Enzymatic Nucleic Acid
uuuuaagccuucuuuuu

SEQ ID NO: 3101 - RNA, 17 nt, Artificial Sequence
  Description of Artificial Sequence:  Enzymatic Nucleic Acid
uuuaagccuucuuuuuu

SEQ ID NO: 3102 - RNA, 17 nt, Artificial Sequence
  Description of Artificial Sequence:  Enzymatic Nucleic Acid
aagccuucuuuuuucuc

SEQ ID NO: 3103 - RNA, 17 nt, Artificial Sequence
  Description of Artificial Sequence:  Enzymatic Nucleic Acid
cuuuuuucucuuuuacc

SEQ ID NO: 3104 - RNA, 17 nt, Artificial Sequence
  Description of Artificial Sequence:  Enzymatic Nucleic Acid
uuuuucucuuuuaccag

SEQ ID NO: 3105 - RNA, 17 nt, Artificial Sequence
  Description of Artificial Sequence:  Enzymatic Nucleic Acid
ucuuuuaccaguuucug

SEQ ID NO: 3106 - RNA, 17 nt, Artificial Sequence
  Description of Artificial Sequence:  Enzymatic Nucleic Acid
cuuuuaccaguuucugg

SEQ ID NO: 3107 - RNA, 17 nt, Artificial Sequence
  Description of Artificial Sequence:  Enzymatic Nucleic Acid
ccaguuucuggagcaaa

SEQ ID NO: 3108 - RNA, 17 nt, Artificial Sequence
  Description of Artificial Sequence:  Enzymatic Nucleic Acid
ucuggagcaaauucagu

SEQ ID NO: 3109 - RNA, 17 nt, Artificial Sequence
  Description of Artificial Sequence:  Enzymatic Nucleic Acid
gcaaauucaguuugccu

SEQ ID NO: 3110 - RNA, 17 nt, Artificial Sequence
  Description of Artificial Sequence:  Enzymatic Nucleic Acid
caguuugccuuccugga

SEQ ID NO: 3111 - RNA, 17 nt, Artificial Sequence
  Description of Artificial Sequence:  Enzymatic Nucleic Acid
aguuugccuuccuggau

SEQ ID NO: 3112 - RNA, 17 nt, Artificial Sequence
  Description of Artificial Sequence:  Enzymatic Nucleic Acid
uugccuuccuggauuug

SEQ ID NO: 3113 - RNA, 17 nt, Artificial Sequence
  Description of Artificial Sequence:  Enzymatic Nucleic Acid
ugccuuccuggauuugu

SEQ ID NO: 3114 - RNA, 17 nt, Artificial Sequence
  Description of Artificial Sequence:  Enzymatic Nucleic Acid
guaaugaccucaaaacu

SEQ ID NO: 3115 - RNA, 17 nt, Artificial Sequence
  Description of Artificial Sequence:  Enzymatic Nucleic Acid
uaaugaccucaaaacuu

SEQ ID NO: 3116 - RNA, 17 nt, Artificial Sequence
  Description of Artificial Sequence:  Enzymatic Nucleic Acid
augaccucaaaacuuua

SEQ ID NO: 3117 - RNA, 17 nt, Artificial Sequence
  Description of Artificial Sequence:  Enzymatic Nucleic Acid
cucaaaacuuuagcagu

SEQ ID NO: 3118 - RNA, 17 nt, Artificial Sequence
  Description of Artificial Sequence:  Enzymatic Nucleic Acid
acuuuagcaguucuucc

SEQ ID NO: 3119 - RNA, 17 nt, Artificial Sequence
  Description of Artificial Sequence:  Enzymatic Nucleic Acid
agcaguucuuccaucug

SEQ ID NO: 3120 - RNA, 17 nt, Artificial Sequence
  Description of Artificial Sequence:  Enzymatic Nucleic Acid
aguucuuccaucugacu

SEQ ID NO: 3121 - RNA, 17 nt, Artificial Sequence
  Description of Artificial Sequence:  Enzymatic Nucleic Acid
guucuuccaucugacuc

SEQ ID NO: 3122 - RNA, 17 nt, Artificial Sequence
  Description of Artificial Sequence:  Enzymatic Nucleic Acid
cuuccaucugacucagg

SEQ ID NO: 3123 - RNA, 17 nt, Artificial Sequence
  Description of Artificial Sequence:  Enzymatic Nucleic Acid
caucugacucagguuug

SEQ ID NO: 3124 - RNA, 17 nt, Artificial Sequence
  Description of Artificial Sequence:  Enzymatic Nucleic Acid
ucugacucagguuugcu

SEQ ID NO: 3125 - RNA, 17 nt, Artificial Sequence
  Description of Artificial Sequence:  Enzymatic Nucleic Acid
agguuugcuucucuggc

SEQ ID NO: 3126 - RNA, 17 nt, Artificial Sequence
  Description of Artificial Sequence:  Enzymatic Nucleic Acid
uuugcuucucuggcggu

SEQ ID NO: 3127 - RNA, 17 nt, Artificial Sequence
  Description of Artificial Sequence:  Enzymatic Nucleic Acid
ugcuucucuggcggucu

SEQ ID NO: 3128 - RNA, 17 nt, Artificial Sequence
  Description of Artificial Sequence:  Enzymatic Nucleic Acid
uggcggucuucagaauc

SEQ ID NO: 3129 - RNA, 17 nt, Artificial Sequence
  Description of Artificial Sequence:  Enzymatic Nucleic Acid
cggucuucagaaucaac

SEQ ID NO: 3130 - RNA, 17 nt, Artificial Sequence
  Description of Artificial Sequence:  Enzymatic Nucleic Acid
ucagaaucaacauccac

SEQ ID NO: 3131 - RNA, 17 nt, Artificial Sequence
  Description of Artificial Sequence:  Enzymatic Nucleic Acid
gaaucaacauccacacu

SEQ ID NO: 3132 - RNA, 17 nt, Artificial Sequence
  Description of Artificial Sequence:  Enzymatic Nucleic Acid
ucaacauccacacuucc

SEQ ID NO: 3133 - RNA, 17 nt, Artificial Sequence
  Description of Artificial Sequence:  Enzymatic Nucleic Acid
caacauccacacuuccg

SEQ ID NO: 3134 - RNA, 17 nt, Artificial Sequence
  Description of Artificial Sequence:  Enzymatic Nucleic Acid
acauccacacuuccgug

SEQ ID NO: 3135 - RNA, 17 nt, Artificial Sequence
  Description of Artificial Sequence:  Enzymatic Nucleic Acid
auccacacuuccgugau

SEQ ID NO: 3136 - RNA, 17 nt, Artificial Sequence
  Description of Artificial Sequence:  Enzymatic Nucleic Acid
cacacuuccgugauuau

SEQ ID NO: 3137 - RNA, 17 nt, Artificial Sequence
  Description of Artificial Sequence:  Enzymatic Nucleic Acid
ugauuaucugcgugcau

SEQ ID NO: 3138 - RNA, 17 nt, Artificial Sequence
  Description of Artificial Sequence:  Enzymatic Nucleic Acid
cugcgugcauuuuggac

SEQ ID NO: 3139 - RNA, 17 nt, Artificial Sequence
  Description of Artificial Sequence:  Enzymatic Nucleic Acid
uuuuggacaaagcuucc

SEQ ID NO: 3140 - RNA, 17 nt, Artificial Sequence
  Description of Artificial Sequence:  Enzymatic Nucleic Acid
gacaaagcuuccaacca

SEQ ID NO: 3141 - RNA, 17 nt, Artificial Sequence
  Description of Artificial Sequence:  Enzymatic Nucleic Acid
aaagcuuccaaccagga

SEQ ID NO: 3142 - RNA, 17 nt, Artificial Sequence
  Description of Artificial Sequence:  Enzymatic Nucleic Acid
aagcuuccaaccaggau

SEQ ID NO: 3143 - RNA, 17 nt, Artificial Sequence
  Description of Artificial Sequence:  Enzymatic Nucleic Acid
cuuccaaccaggauacg

SEQ ID NO: 3144 - RNA, 17 nt, Artificial Sequence
  Description of Artificial Sequence:  Enzymatic Nucleic Acid
uuccaaccaggauacgg

SEQ ID NO: 3145 - RNA, 17 nt, Artificial Sequence
  Description of Artificial Sequence:  Enzymatic Nucleic Acid
gaaauggcuggugaucu

SEQ ID NO: 3146 - RNA, 17 nt, Artificial Sequence
  Description of Artificial Sequence:  Enzymatic Nucleic Acid
uggugaucuuucagcag

SEQ ID NO: 3147 - RNA, 17 nt, Artificial Sequence
  Description of Artificial Sequence:  Enzymatic Nucleic Acid
gaucuuucagcagguuu

SEQ ID NO: 3148 - RNA, 17 nt, Artificial Sequence
  Description of Artificial Sequence:  Enzymatic Nucleic Acid
cuuucagcagguuucuu

SEQ ID NO: 3149 - RNA, 17 nt, Artificial Sequence
  Description of Artificial Sequence:  Enzymatic Nucleic Acid
cagguuucuucauggag

SEQ ID NO: 3150 - RNA, 17 nt, Artificial Sequence
  Description of Artificial Sequence:  Enzymatic Nucleic Acid
guuucuucauggaggaa

SEQ ID NO: 3151 - RNA, 17 nt, Artificial Sequence
  Description of Artificial Sequence:  Enzymatic Nucleic Acid
ggaggaacuuaauacau

SEQ ID NO: 3152 - RNA, 17 nt, Artificial Sequence
  Description of Artificial Sequence:  Enzymatic Nucleic Acid
cuuaauacauaccguca

SEQ ID NO: 3153 - RNA, 17 nt, Artificial Sequence
  Description of Artificial Sequence:  Enzymatic Nucleic Acid
auacauaccgucagaag

SEQ ID NO: 3154 - RNA, 17 nt, Artificial Sequence
  Description of Artificial Sequence:  Enzymatic Nucleic Acid
auaccgucagaagcagg

SEQ ID NO: 3155 - RNA, 17 nt, Artificial Sequence
  Description of Artificial Sequence:  Enzymatic Nucleic Acid
ucagaagcagggaguag

SEQ ID NO: 3156 - RNA, 17 nt, Artificial Sequence
  Description of Artificial Sequence:  Enzymatic Nucleic Acid
aguaguacuuaaauauc

SEQ ID NO: 3157 - RNA, 17 nt, Artificial Sequence
  Description of Artificial Sequence:  Enzymatic Nucleic Acid
uaaauaucaagaacugc

SEQ ID NO: 3158 - RNA, 17 nt, Artificial Sequence
  Description of Artificial Sequence:  Enzymatic Nucleic Acid
ucaagaacugccuaauu

SEQ ID NO: 3159 - RNA, 17 nt, Artificial Sequence
  Description of Artificial Sequence:  Enzymatic Nucleic Acid
agaacugccuaauucag

SEQ ID NO: 3160 - RNA, 17 nt, Artificial Sequence
  Description of Artificial Sequence:  Enzymatic Nucleic Acid
gaacugccuaauucagg

SEQ ID NO: 3161 - RNA, 17 nt, Artificial Sequence
  Description of Artificial Sequence:  Enzymatic Nucleic Acid
ccuaauucaggaccucc

SEQ ID NO: 3162 - RNA, 17 nt, Artificial Sequence
  Description of Artificial Sequence:  Enzymatic Nucleic Acid
uucaggaccuccacaug

SEQ ID NO: 3163 - RNA, 17 nt, Artificial Sequence
  Description of Artificial Sequence:  Enzymatic Nucleic Acid
ucaggaccuccacauga

SEQ ID NO: 3164 - RNA, 17 nt, Artificial Sequence
  Description of Artificial Sequence:  Enzymatic Nucleic Acid
aggaccuccacaugaua

SEQ ID NO: 3165 - RNA, 17 nt, Artificial Sequence
  Description of Artificial Sequence:  Enzymatic Nucleic Acid
ggaccuccacaugauag

SEQ ID NO: 3166 - RNA, 17 nt, Artificial Sequence
  Description of Artificial Sequence:  Enzymatic Nucleic Acid
accuccacaugauagga

SEQ ID NO: 3167 - RNA, 17 nt, Artificial Sequence
  Description of Artificial Sequence:  Enzymatic Nucleic Acid
agguuuacauuucaagu

SEQ ID NO: 3168 - RNA, 17 nt, Artificial Sequence
  Description of Artificial Sequence:  Enzymatic Nucleic Acid
uacauuucaaguuauaa

SEQ ID NO: 3169 - RNA, 17 nt, Artificial Sequence
  Description of Artificial Sequence:  Enzymatic Nucleic Acid
agaauuuccagaaggug

SEQ ID NO: 3170 - RNA, 17 nt, Artificial Sequence
  Description of Artificial Sequence:  Enzymatic Nucleic Acid
gaauuuccagaagguga

SEQ ID NO: 3171 - RNA, 17 nt, Artificial Sequence
  Description of Artificial Sequence:  Enzymatic Nucleic Acid
gguagaucaaagaagga

SEQ ID NO: 3172 - RNA, 17 nt, Artificial Sequence
  Description of Artificial Sequence:  Enzymatic Nucleic Acid
aaggaagcaaaaaaugc

SEQ ID NO: 3173 - RNA, 17 nt, Artificial Sequence
  Description of Artificial Sequence:  Enzymatic Nucleic Acid
aaaaaugccgcagccaa

SEQ ID NO: 3174 - RNA, 17 nt, Artificial Sequence
  Description of Artificial Sequence:  Enzymatic Nucleic Acid
aaugccgcagccaaauu

SEQ ID NO: 3175 - RNA, 17 nt, Artificial Sequence
  Description of Artificial Sequence:  Enzymatic Nucleic Acid
gccgcagccaaauuagc

SEQ ID NO: 3176 - RNA, 17 nt, Artificial Sequence
  Description of Artificial Sequence:  Enzymatic Nucleic Acid
ccgcagccaaauuagcu

SEQ ID NO: 3177 - RNA, 17 nt, Artificial Sequence
  Description of Artificial Sequence:  Enzymatic Nucleic Acid
aaauuagcuguugagau

SEQ ID NO: 3178 - RNA, 17 nt, Artificial Sequence
  Description of Artificial Sequence:  Enzymatic Nucleic Acid
ugagauacuuaauaagg

SEQ ID NO: 3179 - RNA, 17 nt, Artificial Sequence
  Description of Artificial Sequence:  Enzymatic Nucleic Acid
aagaaggcaguuagucc

SEQ ID NO: 3180 - RNA, 17 nt, Artificial Sequence
  Description of Artificial Sequence:  Enzymatic Nucleic Acid
aguuaguccuuuauuau

SEQ ID NO: 3181 - RNA, 17 nt, Artificial Sequence
  Description of Artificial Sequence:  Enzymatic Nucleic Acid
guuaguccuuuauuauu

SEQ ID NO: 3182 - RNA, 17 nt, Artificial Sequence
  Description of Artificial Sequence:  Enzymatic Nucleic Acid
uuauugacaacaacgaa

SEQ ID NO: 3183 - RNA, 17 nt, Artificial Sequence
  Description of Artificial Sequence:  Enzymatic Nucleic Acid
uugacaacaacgaauuc

SEQ ID NO: 3184 - RNA, 17 nt, Artificial Sequence
  Description of Artificial Sequence:  Enzymatic Nucleic Acid
acgaauucuucagaagg

SEQ ID NO: 3185 - RNA, 17 nt, Artificial Sequence
  Description of Artificial Sequence:  Enzymatic Nucleic Acid
aauucuucagaaggauu

SEQ ID NO: 3186 - RNA, 17 nt, Artificial Sequence
  Description of Artificial Sequence:  Enzymatic Nucleic Acid
ggauuauccauggggaa

SEQ ID NO: 3187 - RNA, 17 nt, Artificial Sequence
  Description of Artificial Sequence:  Enzymatic Nucleic Acid
gauuauccauggggaau

SEQ ID NO: 3188 - RNA, 17 nt, Artificial Sequence
  Description of Artificial Sequence:  Enzymatic Nucleic Acid
ggaauuacauaggccuu

SEQ ID NO: 3189 - RNA, 17 nt, Artificial Sequence
  Description of Artificial Sequence:  Enzymatic Nucleic Acid
acauaggccuuaucaau

SEQ ID NO: 3190 - RNA, 17 nt, Artificial Sequence
  Description of Artificial Sequence:  Enzymatic Nucleic Acid
cauaggccuuaucaaua

SEQ ID NO: 3191 - RNA, 17 nt, Artificial Sequence
  Description of Artificial Sequence:  Enzymatic Nucleic Acid
gccuuaucaauagaauu

SEQ ID NO: 3192 - RNA, 17 nt, Artificial Sequence
  Description of Artificial Sequence:  Enzymatic Nucleic Acid
agaauugcccagaagaa

SEQ ID NO: 3193 - RNA, 17 nt, Artificial Sequence
  Description of Artificial Sequence:  Enzymatic Nucleic Acid
gaauugcccagaagaaa

SEQ ID NO: 3194 - RNA, 17 nt, Artificial Sequence
  Description of Artificial Sequence:  Enzymatic Nucleic Acid
aauugcccagaagaaaa

SEQ ID NO: 3195 - RNA, 17 nt, Artificial Sequence
  Description of Artificial Sequence:  Enzymatic Nucleic Acid
gaaaagacuaacuguaa

SEQ ID NO: 3196 - RNA, 17 nt, Artificial Sequence
  Description of Artificial Sequence:  Enzymatic Nucleic Acid
agacuaacuguaaauua

SEQ ID NO: 3197 - RNA, 17 nt, Artificial Sequence
  Description of Artificial Sequence:  Enzymatic Nucleic Acid
uuaugaacagugugcau

SEQ ID NO: 3198 - RNA, 17 nt, Artificial Sequence
  Description of Artificial Sequence:  Enzymatic Nucleic Acid
cagugugcaucgggggu

SEQ ID NO: 3199 - RNA, 17 nt, Artificial Sequence
  Description of Artificial Sequence:  Enzymatic Nucleic Acid
gggggugcaugggccag

SEQ ID NO: 3200 - RNA, 17 nt, Artificial Sequence
  Description of Artificial Sequence:  Enzymatic Nucleic Acid
gcaugggccagaaggau

SEQ ID NO: 3201 - RNA, 17 nt, Artificial Sequence
  Description of Artificial Sequence:  Enzymatic Nucleic Acid
caugggccagaaggauu

SEQ ID NO: 3202 - RNA, 17 nt, Artificial Sequence
  Description of Artificial Sequence:  Enzymatic Nucleic Acid
aggauuucauuauaaau

SEQ ID NO: 3203 - RNA, 17 nt, Artificial Sequence
  Description of Artificial Sequence:  Enzymatic Nucleic Acid
auaaaugcaaaauggga

SEQ ID NO: 3204 - RNA, 17 nt, Artificial Sequence
  Description of Artificial Sequence:  Enzymatic Nucleic Acid
aaugggacagaaagaau

SEQ ID NO: 3205 - RNA, 17 nt, Artificial Sequence
  Description of Artificial Sequence:  Enzymatic Nucleic Acid
auugguacagguucuac

SEQ ID NO: 3206 - RNA, 17 nt, Artificial Sequence
  Description of Artificial Sequence:  Enzymatic Nucleic Acid
acagguucuacuaaaca

SEQ ID NO: 3207 - RNA, 17 nt, Artificial Sequence
  Description of Artificial Sequence:  Enzymatic Nucleic Acid
gguucuacuaaacagga

SEQ ID NO: 3208 - RNA, 17 nt, Artificial Sequence
  Description of Artificial Sequence:  Enzymatic Nucleic Acid
uacuaaacaggaagcaa

SEQ ID NO: 3209 - RNA, 17 nt, Artificial Sequence
  Description of Artificial Sequence:  Enzymatic Nucleic Acid
caggaagcaaaacaauu

SEQ ID NO: 3210 - RNA, 17 nt, Artificial Sequence
  Description of Artificial Sequence:  Enzymatic Nucleic Acid
agcaaaacaauuggccg

SEQ ID NO: 3211 - RNA, 17 nt, Artificial Sequence
  Description of Artificial Sequence:  Enzymatic Nucleic Acid
caauuggccgcuaaacu

SEQ ID NO: 3212 - RNA, 17 nt, Artificial Sequence
  Description of Artificial Sequence:  Enzymatic Nucleic Acid
uuggccgcuaaacuugc

SEQ ID NO: 3213 - RNA, 17 nt, Artificial Sequence
  Description of Artificial Sequence:  Enzymatic Nucleic Acid
cgcuaaacuugcauauc

SEQ ID NO: 3214 - RNA, 17 nt, Artificial Sequence
  Description of Artificial Sequence:  Enzymatic Nucleic Acid
aaacuugcauaucuuca

SEQ ID NO: 3215 - RNA, 17 nt, Artificial Sequence
  Description of Artificial Sequence:  Enzymatic Nucleic Acid
ugcauaucuucagauau

SEQ ID NO: 3216 - RNA, 17 nt, Artificial Sequence
  Description of Artificial Sequence:  Enzymatic Nucleic Acid
auaucuucagauauuau

SEQ ID NO: 3217 - RNA, 17 nt, Artificial Sequence
  Description of Artificial Sequence:  Enzymatic Nucleic Acid
auauuaucagaagaaac

SEQ ID NO: 3218 - RNA, 17 nt, Artificial Sequence
  Description of Artificial Sequence:  Enzymatic Nucleic Acid
gaagaaaccucagugaa

SEQ ID NO: 3219 - RNA, 17 nt, Artificial Sequence
  Description of Artificial Sequence:  Enzymatic Nucleic Acid
aagaaaccucagugaaa

SEQ ID NO: 3220 - RNA, 17 nt, Artificial Sequence
  Description of Artificial Sequence:  Enzymatic Nucleic Acid
gaaaccucagugaaauc

SEQ ID NO: 3221 - RNA, 17 nt, Artificial Sequence
  Description of Artificial Sequence:  Enzymatic Nucleic Acid
gugaaaucugacuaccu

SEQ ID NO: 3222 - RNA, 17 nt, Artificial Sequence
  Description of Artificial Sequence:  Enzymatic Nucleic Acid
aaucugacuaccugucc

SEQ ID NO: 3223 - RNA, 17 nt, Artificial Sequence
  Description of Artificial Sequence:  Enzymatic Nucleic Acid
cugacuaccuguccucu

SEQ ID NO: 3224 - RNA, 17 nt, Artificial Sequence
  Description of Artificial Sequence:  Enzymatic Nucleic Acid
ugacuaccuguccucug

SEQ ID NO: 3225 - RNA, 17 nt, Artificial Sequence
  Description of Artificial Sequence:  Enzymatic Nucleic Acid
uaccuguccucugguuc

SEQ ID NO: 3226 - RNA, 17 nt, Artificial Sequence
  Description of Artificial Sequence:  Enzymatic Nucleic Acid
accuguccucugguucu

SEQ ID NO: 3227 - RNA, 17 nt, Artificial Sequence
  Description of Artificial Sequence:  Enzymatic Nucleic Acid
cuguccucugguucuuu

SEQ ID NO: 3228 - RNA, 17 nt, Artificial Sequence
  Description of Artificial Sequence:  Enzymatic Nucleic Acid
ucugguucuuuugcuac

SEQ ID NO: 3229 - RNA, 17 nt, Artificial Sequence
  Description of Artificial Sequence:  Enzymatic Nucleic Acid
ucuuuugcuacuacgug

SEQ ID NO: 3230 - RNA, 17 nt, Artificial Sequence
  Description of Artificial Sequence:  Enzymatic Nucleic Acid
uuugcuacuacguguga

SEQ ID NO: 3231 - RNA, 17 nt, Artificial Sequence
  Description of Artificial Sequence:  Enzymatic Nucleic Acid
ugugagucccaaagcaa

SEQ ID NO: 3232 - RNA, 17 nt, Artificial Sequence
  Description of Artificial Sequence:  Enzymatic Nucleic Acid
gugagucccaaagcaac

SEQ ID NO: 3233 - RNA, 17 nt, Artificial Sequence
  Description of Artificial Sequence:  Enzymatic Nucleic Acid
ugagucccaaagcaacu

SEQ ID NO: 3234 - RNA, 17 nt, Artificial Sequence
  Description of Artificial Sequence:  Enzymatic Nucleic Acid
cccaaagcaacucuuua

SEQ ID NO: 3235 - RNA, 17 nt, Artificial Sequence
  Description of Artificial Sequence:  Enzymatic Nucleic Acid
aaagcaacucuuuagug

SEQ ID NO: 3236 - RNA, 17 nt, Artificial Sequence
  Description of Artificial Sequence:  Enzymatic Nucleic Acid
agcaacucuuuagugac

SEQ ID NO: 3237 - RNA, 17 nt, Artificial Sequence
  Description of Artificial Sequence:  Enzymatic Nucleic Acid
uuagugaccagcacacu

SEQ ID NO: 3238 - RNA, 17 nt, Artificial Sequence
  Description of Artificial Sequence:  Enzymatic Nucleic Acid
uagugaccagcacacuc

SEQ ID NO: 3239 - RNA, 17 nt, Artificial Sequence
  Description of Artificial Sequence:  Enzymatic Nucleic Acid
ugaccagcacacucgcu

SEQ ID NO: 3240 - RNA, 17 nt, Artificial Sequence
  Description of Artificial Sequence:  Enzymatic Nucleic Acid
accagcacacucgcuuc

SEQ ID NO: 3241 - RNA, 17 nt, Artificial Sequence
  Description of Artificial Sequence:  Enzymatic Nucleic Acid
cagcacacucgcuucug

SEQ ID NO: 3242 - RNA, 17 nt, Artificial Sequence
  Description of Artificial Sequence:  Enzymatic Nucleic Acid
acacucgcuucugaauc

SEQ ID NO: 3243 - RNA, 17 nt, Artificial Sequence
  Description of Artificial Sequence:  Enzymatic Nucleic Acid
cucgcuucugaaucauc

SEQ ID NO: 3244 - RNA, 17 nt, Artificial Sequence
  Description of Artificial Sequence:  Enzymatic Nucleic Acid
ucugaaucaucaucuga

SEQ ID NO: 3245 - RNA, 17 nt, Artificial Sequence
  Description of Artificial Sequence:  Enzymatic Nucleic Acid
gaaucaucaucugaagg

SEQ ID NO: 3246 - RNA, 17 nt, Artificial Sequence
  Description of Artificial Sequence:  Enzymatic Nucleic Acid
ucaucaucugaagguga

SEQ ID NO: 3247 - RNA, 17 nt, Artificial Sequence
  Description of Artificial Sequence:  Enzymatic Nucleic Acid
aaggugacuucucagca

SEQ ID NO: 3248 - RNA, 17 nt, Artificial Sequence
  Description of Artificial Sequence:  Enzymatic Nucleic Acid
gugacuucucagcagau

SEQ ID NO: 3249 - RNA, 17 nt, Artificial Sequence
  Description of Artificial Sequence:  Enzymatic Nucleic Acid
gacuucucagcagauac

SEQ ID NO: 3250 - RNA, 17 nt, Artificial Sequence
  Description of Artificial Sequence:  Enzymatic Nucleic Acid
uucucagcagauacauc

SEQ ID NO: 3251 - RNA, 17 nt, Artificial Sequence
  Description of Artificial Sequence:  Enzymatic Nucleic Acid
gcagauacaucagagau

SEQ ID NO: 3252 - RNA, 17 nt, Artificial Sequence
  Description of Artificial Sequence:  Enzymatic Nucleic Acid
gauacaucagagauaaa

SEQ ID NO: 3253 - RNA, 17 nt, Artificial Sequence
  Description of Artificial Sequence:  Enzymatic Nucleic Acid
auaaauucuaacaguga

SEQ ID NO: 3254 - RNA, 17 nt, Artificial Sequence
  Description of Artificial Sequence:  Enzymatic Nucleic Acid
auucuaacagugacagu

SEQ ID NO: 3255 - RNA, 17 nt, Artificial Sequence
  Description of Artificial Sequence:  Enzymatic Nucleic Acid
acagugacaguuuaaac

SEQ ID NO: 3256 - RNA, 17 nt, Artificial Sequence
  Description of Artificial Sequence:  Enzymatic Nucleic Acid
guuuaaacaguucuucg

SEQ ID NO: 3257 - RNA, 17 nt, Artificial Sequence
  Description of Artificial Sequence:  Enzymatic Nucleic Acid
aacaguucuucguugcu

SEQ ID NO: 3258 - RNA, 17 nt, Artificial Sequence
  Description of Artificial Sequence:  Enzymatic Nucleic Acid
uucguugcuuaugaaug

SEQ ID NO: 3259 - RNA, 17 nt, Artificial Sequence
  Description of Artificial Sequence:  Enzymatic Nucleic Acid
gaauggucucagaaaua

SEQ ID NO: 3260 - RNA, 17 nt, Artificial Sequence
  Description of Artificial Sequence:  Enzymatic Nucleic Acid
auggucucagaaauaau

SEQ ID NO: 3261 - RNA, 17 nt, Artificial Sequence
  Description of Artificial Sequence:  Enzymatic Nucleic Acid
aaauaaucaaaggaagg

SEQ ID NO: 3262 - RNA, 17 nt, Artificial Sequence
  Description of Artificial Sequence:  Enzymatic Nucleic Acid
aggaaggcaaaaagauc

SEQ ID NO: 3263 - RNA, 17 nt, Artificial Sequence
  Description of Artificial Sequence:  Enzymatic Nucleic Acid
aaaagaucuuuggcacc

SEQ ID NO: 3264 - RNA, 17 nt, Artificial Sequence
  Description of Artificial Sequence:  Enzymatic Nucleic Acid
ucuuuggcacccagauu

SEQ ID NO: 3265 - RNA, 17 nt, Artificial Sequence
  Description of Artificial Sequence:  Enzymatic Nucleic Acid
uuuggcacccagauuug

SEQ ID NO: 3266 - RNA, 17 nt, Artificial Sequence
  Description of Artificial Sequence:  Enzymatic Nucleic Acid
uuggcacccagauuuga

SEQ ID NO: 3267 - RNA, 17 nt, Artificial Sequence
  Description of Artificial Sequence:  Enzymatic Nucleic Acid
uggcacccagauuugac

SEQ ID NO: 3268 - RNA, 17 nt, Artificial Sequence
  Description of Artificial Sequence:  Enzymatic Nucleic Acid
gauuugaccuuccugac

SEQ ID NO: 3269 - RNA, 17 nt, Artificial Sequence
  Description of Artificial Sequence:  Enzymatic Nucleic Acid
auuugaccuuccugaca

SEQ ID NO: 3270 - RNA, 17 nt, Artificial Sequence
  Description of Artificial Sequence:  Enzymatic Nucleic Acid
ugaccuuccugacauga

SEQ ID NO: 3271 - RNA, 17 nt, Artificial Sequence
  Description of Artificial Sequence:  Enzymatic Nucleic Acid
gaccuuccugacaugaa

SEQ ID NO: 3272 - RNA, 17 nt, Artificial Sequence
  Description of Artificial Sequence:  Enzymatic Nucleic Acid
uuccugacaugaaagaa

SEQ ID NO: 3273 - RNA, 17 nt, Artificial Sequence
  Description of Artificial Sequence:  Enzymatic Nucleic Acid
aaagaaacaaaguauac

SEQ ID NO: 3274 - RNA, 17 nt, Artificial Sequence
  Description of Artificial Sequence:  Enzymatic Nucleic Acid
aaguauacuguggacaa

SEQ ID NO: 3275 - RNA, 17 nt, Artificial Sequence
  Description of Artificial Sequence:  Enzymatic Nucleic Acid
cuguggacaagagguuu

SEQ ID NO: 3276 - RNA, 17 nt, Artificial Sequence
  Description of Artificial Sequence:  Enzymatic Nucleic Acid
gguuuggcauggauuuu

SEQ ID NO: 3277 - RNA, 17 nt, Artificial Sequence
  Description of Artificial Sequence:  Enzymatic Nucleic Acid
uaauuggcucaggugga

SEQ ID NO: 3278 - RNA, 17 nt, Artificial Sequence
  Description of Artificial Sequence:  Enzymatic Nucleic Acid
auuggcucagguggauu

SEQ ID NO: 3279 - RNA, 17 nt, Artificial Sequence
  Description of Artificial Sequence:  Enzymatic Nucleic Acid
gauuuggccaaguuuuc

SEQ ID NO: 3280 - RNA, 17 nt, Artificial Sequence
  Description of Artificial Sequence:  Enzymatic Nucleic Acid
auuuggccaaguuuuca

SEQ ID NO: 3281 - RNA, 17 nt, Artificial Sequence
  Description of Artificial Sequence:  Enzymatic Nucleic Acid
aaguuuucaaagcaaaa

SEQ ID NO: 3282 - RNA, 17 nt, Artificial Sequence
  Description of Artificial Sequence:  Enzymatic Nucleic Acid
uucaaagcaaaacacag

SEQ ID NO: 3283 - RNA, 17 nt, Artificial Sequence
  Description of Artificial Sequence:  Enzymatic Nucleic Acid
agcaaaacacagaauug

SEQ ID NO: 3284 - RNA, 17 nt, Artificial Sequence
  Description of Artificial Sequence:  Enzymatic Nucleic Acid
caaaacacagaauugac

SEQ ID NO: 3285 - RNA, 17 nt, Artificial Sequence
  Description of Artificial Sequence:  Enzymatic Nucleic Acid
ggaaagacuuacguuau

SEQ ID NO: 3286 - RNA, 17 nt, Artificial Sequence
  Description of Artificial Sequence:  Enzymatic Nucleic Acid
guaaaagcauuggcaaa

SEQ ID NO: 3287 - RNA, 17 nt, Artificial Sequence
  Description of Artificial Sequence:  Enzymatic Nucleic Acid
gcauuggcaaaacuuga

SEQ ID NO: 3288 - RNA, 17 nt, Artificial Sequence
  Description of Artificial Sequence:  Enzymatic Nucleic Acid
ggcaaaacuugaucaug

SEQ ID NO: 3289 - RNA, 17 nt, Artificial Sequence
  Description of Artificial Sequence:  Enzymatic Nucleic Acid
acuugaucauguaaaua

SEQ ID NO: 3290 - RNA, 17 nt, Artificial Sequence
  Description of Artificial Sequence:  Enzymatic Nucleic Acid
uauuguucacuacaaug

SEQ ID NO: 3291 - RNA, 17 nt, Artificial Sequence
  Description of Artificial Sequence:  Enzymatic Nucleic Acid
uuguucacuacaauggc

SEQ ID NO: 3292 - RNA, 17 nt, Artificial Sequence
  Description of Artificial Sequence:  Enzymatic Nucleic Acid
uucacuacaauggcugu

SEQ ID NO: 3293 - RNA, 17 nt, Artificial Sequence
  Description of Artificial Sequence:  Enzymatic Nucleic Acid
acaauggcuguugggau

SEQ ID NO: 3294 - RNA, 17 nt, Artificial Sequence
  Description of Artificial Sequence:  Enzymatic Nucleic Acid
uuaugauccugagacca

SEQ ID NO: 3295 - RNA, 17 nt, Artificial Sequence
  Description of Artificial Sequence:  Enzymatic Nucleic Acid
uaugauccugagaccag

SEQ ID NO: 3296 - RNA, 17 nt, Artificial Sequence
  Description of Artificial Sequence:  Enzymatic Nucleic Acid
ccugagaccagugauga

SEQ ID NO: 3297 - RNA, 17 nt, Artificial Sequence
  Description of Artificial Sequence:  Enzymatic Nucleic Acid
cugagaccagugaugau

SEQ ID NO: 3298 - RNA, 17 nt, Artificial Sequence
  Description of Artificial Sequence:  Enzymatic Nucleic Acid
gaugauucucuugagag

SEQ ID NO: 3299 - RNA, 17 nt, Artificial Sequence
  Description of Artificial Sequence:  Enzymatic Nucleic Acid
ugauucucuugagagca

SEQ ID NO: 3300 - RNA, 17 nt, Artificial Sequence
  Description of Artificial Sequence:  Enzymatic Nucleic Acid
uugagagcagugauuau

SEQ ID NO: 3301 - RNA, 17 nt, Artificial Sequence
  Description of Artificial Sequence:  Enzymatic Nucleic Acid
uuaugauccugagaaca

SEQ ID NO: 3302 - RNA, 17 nt, Artificial Sequence
  Description of Artificial Sequence:  Enzymatic Nucleic Acid
uaugauccugagaacag

SEQ ID NO: 3303 - RNA, 17 nt, Artificial Sequence
  Description of Artificial Sequence:  Enzymatic Nucleic Acid
cugagaacagcaaaaau

SEQ ID NO: 3304 - RNA, 17 nt, Artificial Sequence
  Description of Artificial Sequence:  Enzymatic Nucleic Acid
agaacagcaaaaauagu

SEQ ID NO: 3305 - RNA, 17 nt, Artificial Sequence
  Description of Artificial Sequence:  Enzymatic Nucleic Acid
aauaguucaaggucaaa

SEQ ID NO: 3306 - RNA, 17 nt, Artificial Sequence
  Description of Artificial Sequence:  Enzymatic Nucleic Acid
ucaaggucaaagacuaa

SEQ ID NO: 3307 - RNA, 17 nt, Artificial Sequence
  Description of Artificial Sequence:  Enzymatic Nucleic Acid
ucaaagacuaagugccu

SEQ ID NO: 3308 - RNA, 17 nt, Artificial Sequence
  Description of Artificial Sequence:  Enzymatic Nucleic Acid
cuaagugccuuuucauc

SEQ ID NO: 3309 - RNA, 17 nt, Artificial Sequence
  Description of Artificial Sequence:  Enzymatic Nucleic Acid
uaagugccuuuucaucc

SEQ ID NO: 3310 - RNA, 17 nt, Artificial Sequence
  Description of Artificial Sequence:  Enzymatic Nucleic Acid
gccuuuucauccaaaug

SEQ ID NO: 3311 - RNA, 17 nt, Artificial Sequence
  Description of Artificial Sequence:  Enzymatic Nucleic Acid
uuuucauccaaauggaa

SEQ ID NO: 3312 - RNA, 17 nt, Artificial Sequence
  Description of Artificial Sequence:  Enzymatic Nucleic Acid
uuucauccaaauggaau

SEQ ID NO: 3313 - RNA, 17 nt, Artificial Sequence
  Description of Artificial Sequence:  Enzymatic Nucleic Acid
uggaauucugugauaaa

SEQ ID NO: 3314 - RNA, 17 nt, Artificial Sequence
  Description of Artificial Sequence:  Enzymatic Nucleic Acid
aaagggaccuuggaaca

SEQ ID NO: 3315 - RNA, 17 nt, Artificial Sequence
  Description of Artificial Sequence:  Enzymatic Nucleic Acid
aagggaccuuggaacaa

SEQ ID NO: 3316 - RNA, 17 nt, Artificial Sequence
  Description of Artificial Sequence:  Enzymatic Nucleic Acid
cuuggaacaauggauug

SEQ ID NO: 3317 - RNA, 17 nt, Artificial Sequence
  Description of Artificial Sequence:  Enzymatic Nucleic Acid
cgagaaacuagacaaag

SEQ ID NO: 3318 - RNA, 17 nt, Artificial Sequence
  Description of Artificial Sequence:  Enzymatic Nucleic Acid
aacuagacaaaguuuug

SEQ ID NO: 3319 - RNA, 17 nt, Artificial Sequence
  Description of Artificial Sequence:  Enzymatic Nucleic Acid
guuuuggcuuuggaacu

SEQ ID NO: 3320 - RNA, 17 nt, Artificial Sequence
  Description of Artificial Sequence:  Enzymatic Nucleic Acid
uuuggaacucuuugaac

SEQ ID NO: 3321 - RNA, 17 nt, Artificial Sequence
  Description of Artificial Sequence:  Enzymatic Nucleic Acid
uggaacucuuugaacaa

SEQ ID NO: 3322 - RNA, 17 nt, Artificial Sequence
  Description of Artificial Sequence:  Enzymatic Nucleic Acid
cuuugaacaaauaacaa

SEQ ID NO: 3323 - RNA, 17 nt, Artificial Sequence
  Description of Artificial Sequence:  Enzymatic Nucleic Acid
caaauaacaaaaggggu

SEQ ID NO: 3324 - RNA, 17 nt, Artificial Sequence
  Description of Artificial Sequence:  Enzymatic Nucleic Acid
uuauauacauucaaaaa

SEQ ID NO: 3325 - RNA, 17 nt, Artificial Sequence
  Description of Artificial Sequence:  Enzymatic Nucleic Acid
auacauucaaaaaaauu

SEQ ID NO: 3326 - RNA, 17 nt, Artificial Sequence
  Description of Artificial Sequence:  Enzymatic Nucleic Acid
auuaauucauagagauc

SEQ ID NO: 3327 - RNA, 17 nt, Artificial Sequence
  Description of Artificial Sequence:  Enzymatic Nucleic Acid
uagagaucuuaagccaa

SEQ ID NO: 3328 - RNA, 17 nt, Artificial Sequence
  Description of Artificial Sequence:  Enzymatic Nucleic Acid
ucuuaagccaaguaaua

SEQ ID NO: 3329 - RNA, 17 nt, Artificial Sequence
  Description of Artificial Sequence:  Enzymatic Nucleic Acid
cuuaagccaaguaauau

SEQ ID NO: 3330 - RNA, 17 nt, Artificial Sequence
  Description of Artificial Sequence:  Enzymatic Nucleic Acid
auauauucuuaguagau

SEQ ID NO: 3331 - RNA, 17 nt, Artificial Sequence
  Description of Artificial Sequence:  Enzymatic Nucleic Acid
guagauacaaaacaagu

SEQ ID NO: 3332 - RNA, 17 nt, Artificial Sequence
  Description of Artificial Sequence:  Enzymatic Nucleic Acid
uacaaaacaaguaaaga

SEQ ID NO: 3333 - RNA, 17 nt, Artificial Sequence
  Description of Artificial Sequence:  Enzymatic Nucleic Acid
uuggagacuuuggacuu

SEQ ID NO: 3334 - RNA, 17 nt, Artificial Sequence
  Description of Artificial Sequence:  Enzymatic Nucleic Acid
cuuuggacuuguaacau

SEQ ID NO: 3335 - RNA, 17 nt, Artificial Sequence
  Description of Artificial Sequence:  Enzymatic Nucleic Acid
cuuguaacaucucugaa

SEQ ID NO: 3336 - RNA, 17 nt, Artificial Sequence
  Description of Artificial Sequence:  Enzymatic Nucleic Acid
guaacaucucugaaaaa

SEQ ID NO: 3337 - RNA, 17 nt, Artificial Sequence
  Description of Artificial Sequence:  Enzymatic Nucleic Acid
aacaucucugaaaaaug

SEQ ID NO: 3338 - RNA, 17 nt, Artificial Sequence
  Description of Artificial Sequence:  Enzymatic Nucleic Acid
aagcgaacaaggaguaa

SEQ ID NO: 3339 - RNA, 17 nt, Artificial Sequence
  Description of Artificial Sequence:  Enzymatic Nucleic Acid
aagggaacuuugcgaua

SEQ ID NO: 3340 - RNA, 17 nt, Artificial Sequence
  Description of Artificial Sequence:  Enzymatic Nucleic Acid
ugcgauacaugagccca

SEQ ID NO: 3341 - RNA, 17 nt, Artificial Sequence
  Description of Artificial Sequence:  Enzymatic Nucleic Acid
acaugagcccagaacag

SEQ ID NO: 3342 - RNA, 17 nt, Artificial Sequence
  Description of Artificial Sequence:  Enzymatic Nucleic Acid
caugagcccagaacaga

SEQ ID NO: 3343 - RNA, 17 nt, Artificial Sequence
  Description of Artificial Sequence:  Enzymatic Nucleic Acid
augagcccagaacagau

SEQ ID NO: 3344 - RNA, 17 nt, Artificial Sequence
  Description of Artificial Sequence:  Enzymatic Nucleic Acid
cccagaacagauuucuu

SEQ ID NO: 3345 - RNA, 17 nt, Artificial Sequence
  Description of Artificial Sequence:  Enzymatic Nucleic Acid
cagauuucuucgcaaga

SEQ ID NO: 3346 - RNA, 17 nt, Artificial Sequence
  Description of Artificial Sequence:  Enzymatic Nucleic Acid
uucuucgcaagacuaug

SEQ ID NO: 3347 - RNA, 17 nt, Artificial Sequence
  Description of Artificial Sequence:  Enzymatic Nucleic Acid
cgcaagacuauggaaag

SEQ ID NO: 3348 - RNA, 17 nt, Artificial Sequence
  Description of Artificial Sequence:  Enzymatic Nucleic Acid
aaguggaccucuacgcu

SEQ ID NO: 3349 - RNA, 17 nt, Artificial Sequence
  Description of Artificial Sequence:  Enzymatic Nucleic Acid
aguggaccucuacgcuu

SEQ ID NO: 3350 - RNA, 17 nt, Artificial Sequence
  Description of Artificial Sequence:  Enzymatic Nucleic Acid
uggaccucuacgcuuug

SEQ ID NO: 3351 - RNA, 17 nt, Artificial Sequence
  Description of Artificial Sequence:  Enzymatic Nucleic Acid
cucuacgcuuuggggcu

SEQ ID NO: 3352 - RNA, 17 nt, Artificial Sequence
  Description of Artificial Sequence:  Enzymatic Nucleic Acid
uuuggggcuaauucuug

SEQ ID NO: 3353 - RNA, 17 nt, Artificial Sequence
  Description of Artificial Sequence:  Enzymatic Nucleic Acid
gcuaauucuugcugaac

SEQ ID NO: 3354 - RNA, 17 nt, Artificial Sequence
  Description of Artificial Sequence:  Enzymatic Nucleic Acid
auucuugcugaacuucu

SEQ ID NO: 3355 - RNA, 17 nt, Artificial Sequence
  Description of Artificial Sequence:  Enzymatic Nucleic Acid
ugcugaacuucuucaug

SEQ ID NO: 3356 - RNA, 17 nt, Artificial Sequence
  Description of Artificial Sequence:  Enzymatic Nucleic Acid
ugaacuucuucauguau

SEQ ID NO: 3357 - RNA, 17 nt, Artificial Sequence
  Description of Artificial Sequence:  Enzymatic Nucleic Acid
acuucuucauguaugug

SEQ ID NO: 3358 - RNA, 17 nt, Artificial Sequence
  Description of Artificial Sequence:  Enzymatic Nucleic Acid
uaugugacacugcuuuu

SEQ ID NO: 3359 - RNA, 17 nt, Artificial Sequence
  Description of Artificial Sequence:  Enzymatic Nucleic Acid
ugugacacugcuuuuga

SEQ ID NO: 3360 - RNA, 17 nt, Artificial Sequence
  Description of Artificial Sequence:  Enzymatic Nucleic Acid
gacacugcuuuugaaac

SEQ ID NO: 3361 - RNA, 17 nt, Artificial Sequence
  Description of Artificial Sequence:  Enzymatic Nucleic Acid
uuugaaacaucaaaguu

SEQ ID NO: 3362 - RNA, 17 nt, Artificial Sequence
  Description of Artificial Sequence:  Enzymatic Nucleic Acid
gaaacaucaaaguuuuu

SEQ ID NO: 3363 - RNA, 17 nt, Artificial Sequence
  Description of Artificial Sequence:  Enzymatic Nucleic Acid
aguuuuucacagaccua

SEQ ID NO: 3364 - RNA, 17 nt, Artificial Sequence
  Description of Artificial Sequence:  Enzymatic Nucleic Acid
uuuuucacagaccuacg

SEQ ID NO: 3365 - RNA, 17 nt, Artificial Sequence
  Description of Artificial Sequence:  Enzymatic Nucleic Acid
ucacagaccuacgggau

SEQ ID NO: 3366 - RNA, 17 nt, Artificial Sequence
  Description of Artificial Sequence:  Enzymatic Nucleic Acid
cacagaccuacgggaug

SEQ ID NO: 3367 - RNA, 17 nt, Artificial Sequence
  Description of Artificial Sequence:  Enzymatic Nucleic Acid
gggauggcaucaucuca

SEQ ID NO: 3368 - RNA, 17 nt, Artificial Sequence
  Description of Artificial Sequence:  Enzymatic Nucleic Acid
auggcaucaucucagau

SEQ ID NO: 3369 - RNA, 17 nt, Artificial Sequence
  Description of Artificial Sequence:  Enzymatic Nucleic Acid
gcaucaucucagauaua

SEQ ID NO: 3370 - RNA, 17 nt, Artificial Sequence
  Description of Artificial Sequence:  Enzymatic Nucleic Acid
aucaucucagauauauu

SEQ ID NO: 3371 - RNA, 17 nt, Artificial Sequence
  Description of Artificial Sequence:  Enzymatic Nucleic Acid
gaaaaaacucuucuaca

SEQ ID NO: 3372 - RNA, 17 nt, Artificial Sequence
  Description of Artificial Sequence:  Enzymatic Nucleic Acid
aaaaacucuucuacaga

SEQ ID NO: 3373 - RNA, 17 nt, Artificial Sequence
  Description of Artificial Sequence:  Enzymatic Nucleic Acid
aacucuucuacagaaau

SEQ ID NO: 3374 - RNA, 17 nt, Artificial Sequence
  Description of Artificial Sequence:  Enzymatic Nucleic Acid
ucuucuacagaaauuac

SEQ ID NO: 3375 - RNA, 17 nt, Artificial Sequence
  Description of Artificial Sequence:  Enzymatic Nucleic Acid
gaaauuacucucaaaga

SEQ ID NO: 3376 - RNA, 17 nt, Artificial Sequence
  Description of Artificial Sequence:  Enzymatic Nucleic Acid
aauuacucucaaagaaa

SEQ ID NO: 3377 - RNA, 17 nt, Artificial Sequence
  Description of Artificial Sequence:  Enzymatic Nucleic Acid
uuacucucaaagaaacc

SEQ ID NO: 3378 - RNA, 17 nt, Artificial Sequence
  Description of Artificial Sequence:  Enzymatic Nucleic Acid
aaagaaaccugaggauc

SEQ ID NO: 3379 - RNA, 17 nt, Artificial Sequence
  Description of Artificial Sequence:  Enzymatic Nucleic Acid
aagaaaccugaggaucg

SEQ ID NO: 3380 - RNA, 17 nt, Artificial Sequence
  Description of Artificial Sequence:  Enzymatic Nucleic Acid
ggaucgaccuaacacau

SEQ ID NO: 3381 - RNA, 17 nt, Artificial Sequence
  Description of Artificial Sequence:  Enzymatic Nucleic Acid
gaucgaccuaacacauc

SEQ ID NO: 3382 - RNA, 17 nt, Artificial Sequence
  Description of Artificial Sequence:  Enzymatic Nucleic Acid
gaccuaacacaucugaa

SEQ ID NO: 3383 - RNA, 17 nt, Artificial Sequence
  Description of Artificial Sequence:  Enzymatic Nucleic Acid
ccuaacacaucugaaau

SEQ ID NO: 3384 - RNA, 17 nt, Artificial Sequence
  Description of Artificial Sequence:  Enzymatic Nucleic Acid
aacacaucugaaauacu

SEQ ID NO: 3385 - RNA, 17 nt, Artificial Sequence
  Description of Artificial Sequence:  Enzymatic Nucleic Acid
ugaaauacuaaggaccu

SEQ ID NO: 3386 - RNA, 17 nt, Artificial Sequence
  Description of Artificial Sequence:  Enzymatic Nucleic Acid
cuaaggaccuugacugu

SEQ ID NO: 3387 - RNA, 17 nt, Artificial Sequence
  Description of Artificial Sequence:  Enzymatic Nucleic Acid
uaaggaccuugacugug

SEQ ID NO: 3388 - RNA, 17 nt, Artificial Sequence
  Description of Artificial Sequence:  Enzymatic Nucleic Acid
accuugacuguguggaa

SEQ ID NO: 3389 - RNA, 17 nt, Artificial Sequence
  Description of Artificial Sequence:  Enzymatic Nucleic Acid
agaaaagcccagagaaa

SEQ ID NO: 3390 - RNA, 17 nt, Artificial Sequence
  Description of Artificial Sequence:  Enzymatic Nucleic Acid
gaaaagcccagagaaaa

SEQ ID NO: 3391 - RNA, 17 nt, Artificial Sequence
  Description of Artificial Sequence:  Enzymatic Nucleic Acid
aaaagcccagagaaaaa

SEQ ID NO: 3392 - RNA, 17 nt, Artificial Sequence
  Description of Artificial Sequence:  Enzymatic Nucleic Acid
ugaacgacacacauguu

SEQ ID NO: 3393 - RNA, 17 nt, Artificial Sequence
  Description of Artificial Sequence:  Enzymatic Nucleic Acid
aacgacacacauguuag

SEQ ID NO: 3394 - RNA, 17 nt, Artificial Sequence
  Description of Artificial Sequence:  Enzymatic Nucleic Acid
cgacacacauguuagag

SEQ ID NO: 3395 - RNA, 17 nt, Artificial Sequence
  Description of Artificial Sequence:  Enzymatic Nucleic Acid
guuagagcccuucugaa

SEQ ID NO: 3396 - RNA, 17 nt, Artificial Sequence
  Description of Artificial Sequence:  Enzymatic Nucleic Acid
uuagagcccuucugaaa

SEQ ID NO: 3397 - RNA, 17 nt, Artificial Sequence
  Description of Artificial Sequence:  Enzymatic Nucleic Acid
uagagcccuucugaaaa

SEQ ID NO: 3398 - RNA, 17 nt, Artificial Sequence
  Description of Artificial Sequence:  Enzymatic Nucleic Acid
agcccuucugaaaaagu

SEQ ID NO: 3399 - RNA, 17 nt, Artificial Sequence
  Description of Artificial Sequence:  Enzymatic Nucleic Acid
aaaguauccugcuucug

SEQ ID NO: 3400 - RNA, 17 nt, Artificial Sequence
  Description of Artificial Sequence:  Enzymatic Nucleic Acid
aaguauccugcuucuga

SEQ ID NO: 3401 - RNA, 17 nt, Artificial Sequence
  Description of Artificial Sequence:  Enzymatic Nucleic Acid
uauccugcuucugauau

SEQ ID NO: 3402 - RNA, 17 nt, Artificial Sequence
  Description of Artificial Sequence:  Enzymatic Nucleic Acid
ccugcuucugauaugca

SEQ ID NO: 3403 - RNA, 17 nt, Artificial Sequence
  Description of Artificial Sequence:  Enzymatic Nucleic Acid
ugauaugcaguuuuccu

SEQ ID NO: 3404 - RNA, 17 nt, Artificial Sequence
  Description of Artificial Sequence:  Enzymatic Nucleic Acid
caguuuuccuuaaauua

SEQ ID NO: 3405 - RNA, 17 nt, Artificial Sequence
  Description of Artificial Sequence:  Enzymatic Nucleic Acid
aguuuuccuuaaauuau

SEQ ID NO: 3406 - RNA, 17 nt, Artificial Sequence
  Description of Artificial Sequence:  Enzymatic Nucleic Acid
aaauuaucuaaaaucug

SEQ ID NO: 3407 - RNA, 17 nt, Artificial Sequence
  Description of Artificial Sequence:  Enzymatic Nucleic Acid
cuaaaaucugcuaggga

SEQ ID NO: 3408 - RNA, 17 nt, Artificial Sequence
  Description of Artificial Sequence:  Enzymatic Nucleic Acid
aaaucugcuagggaaua

SEQ ID NO: 3409 - RNA, 17 nt, Artificial Sequence
  Description of Artificial Sequence:  Enzymatic Nucleic Acid
ggaauaucaauagauau

SEQ ID NO: 3410 - RNA, 17 nt, Artificial Sequence
  Description of Artificial Sequence:  Enzymatic Nucleic Acid
auauuuaccuuuuauuu

SEQ ID NO: 3411 - RNA, 17 nt, Artificial Sequence
  Description of Artificial Sequence:  Enzymatic Nucleic Acid
uauuuaccuuuuauuuu

SEQ ID NO: 3412 - RNA, 17 nt, Artificial Sequence
  Description of Artificial Sequence:  Enzymatic Nucleic Acid
aauguuuccuuuaauuu

SEQ ID NO: 3413 - RNA, 17 nt, Artificial Sequence
  Description of Artificial Sequence:  Enzymatic Nucleic Acid
auguuuccuuuaauuuu

SEQ ID NO: 3414 - RNA, 17 nt, Artificial Sequence
  Description of Artificial Sequence:  Enzymatic Nucleic Acid
uuuuuuacuauuuuuac

SEQ ID NO: 3415 - RNA, 17 nt, Artificial Sequence
  Description of Artificial Sequence:  Enzymatic Nucleic Acid
auuuuuacuaaucuuuc

SEQ ID NO: 3416 - RNA, 17 nt, Artificial Sequence
  Description of Artificial Sequence:  Enzymatic Nucleic Acid
uacuaaucuuucugcag

SEQ ID NO: 3417 - RNA, 17 nt, Artificial Sequence
  Description of Artificial Sequence:  Enzymatic Nucleic Acid
aaucuuucugcagaaac

SEQ ID NO: 3418 - RNA, 17 nt, Artificial Sequence
  Description of Artificial Sequence:  Enzymatic Nucleic Acid
cuuucugcagaaacaga

SEQ ID NO: 3419 - RNA, 17 nt, Artificial Sequence
  Description of Artificial Sequence:  Enzymatic Nucleic Acid
gcagaaacagaaagguu

SEQ ID NO: 3420 - RNA, 17 nt, Artificial Sequence
  Description of Artificial Sequence:  Enzymatic Nucleic Acid
agguuuucuucuuuuug

SEQ ID NO: 3421 - RNA, 17 nt, Artificial Sequence
  Description of Artificial Sequence:  Enzymatic Nucleic Acid
uuuucuucuuuuugcuu

SEQ ID NO: 3422 - RNA, 17 nt, Artificial Sequence
  Description of Artificial Sequence:  Enzymatic Nucleic Acid
cuuuuugcuucaaaaac

SEQ ID NO: 3423 - RNA, 17 nt, Artificial Sequence
  Description of Artificial Sequence:  Enzymatic Nucleic Acid
uuugcuucaaaaacauu

SEQ ID NO: 3424 - RNA, 17 nt, Artificial Sequence
  Description of Artificial Sequence:  Enzymatic Nucleic Acid
ucaaaaacauucuuaca

SEQ ID NO: 3425 - RNA, 17 nt, Artificial Sequence
  Description of Artificial Sequence:  Enzymatic Nucleic Acid
aaacauucuuacauuuu

SEQ ID NO: 3426 - RNA, 17 nt, Artificial Sequence
  Description of Artificial Sequence:  Enzymatic Nucleic Acid
auucuuacauuuuacuu

SEQ ID NO: 3427 - RNA, 17 nt, Artificial Sequence
  Description of Artificial Sequence:  Enzymatic Nucleic Acid
cauuuuacuuuuuccug

SEQ ID NO: 3428 - RNA, 17 nt, Artificial Sequence
  Description of Artificial Sequence:  Enzymatic Nucleic Acid
acuuuuuccuggcucau

SEQ ID NO: 3429 - RNA, 17 nt, Artificial Sequence
  Description of Artificial Sequence:  Enzymatic Nucleic Acid
cuuuuuccuggcucauc

SEQ ID NO: 3430 - RNA, 17 nt, Artificial Sequence
  Description of Artificial Sequence:  Enzymatic Nucleic Acid
uuccuggcucaucucuu

SEQ ID NO: 3431 - RNA, 17 nt, Artificial Sequence
  Description of Artificial Sequence:  Enzymatic Nucleic Acid
ccuggcucaucucuuua

SEQ ID NO: 3432 - RNA, 17 nt, Artificial Sequence
  Description of Artificial Sequence:  Enzymatic Nucleic Acid
ggcucaucucuuuauuc

SEQ ID NO: 3433 - RNA, 17 nt, Artificial Sequence
  Description of Artificial Sequence:  Enzymatic Nucleic Acid
cucaucucuuuauucuu

SEQ ID NO: 3434 - RNA, 17 nt, Artificial Sequence
  Description of Artificial Sequence:  Enzymatic Nucleic Acid
cuuuauucuuuuuuuuu

SEQ ID NO: 3435 - RNA, 17 nt, Artificial Sequence
  Description of Artificial Sequence:  Enzymatic Nucleic Acid
uuaaagacagagucucg

SEQ ID NO: 3436 - RNA, 17 nt, Artificial Sequence
  Description of Artificial Sequence:  Enzymatic Nucleic Acid
acagagucucgcucugu

SEQ ID NO: 3437 - RNA, 17 nt, Artificial Sequence
  Description of Artificial Sequence:  Enzymatic Nucleic Acid
agucucgcucuguugcc

SEQ ID NO: 3438 - RNA, 17 nt, Artificial Sequence
  Description of Artificial Sequence:  Enzymatic Nucleic Acid
ucucgcucuguugccca

SEQ ID NO: 3439 - RNA, 17 nt, Artificial Sequence
  Description of Artificial Sequence:  Enzymatic Nucleic Acid
ucuguugcccaggcugg

SEQ ID NO: 3440 - RNA, 17 nt, Artificial Sequence
  Description of Artificial Sequence:  Enzymatic Nucleic Acid
cuguugcccaggcugga

SEQ ID NO: 3441 - RNA, 17 nt, Artificial Sequence
  Description of Artificial Sequence:  Enzymatic Nucleic Acid
uguugcccaggcuggag

SEQ ID NO: 3442 - RNA, 17 nt, Artificial Sequence
  Description of Artificial Sequence:  Enzymatic Nucleic Acid
gcccaggcuggagugca

SEQ ID NO: 3443 - RNA, 17 nt, Artificial Sequence
  Description of Artificial Sequence:  Enzymatic Nucleic Acid
uggagugcaaugacaca

SEQ ID NO: 3444 - RNA, 17 nt, Artificial Sequence
  Description of Artificial Sequence:  Enzymatic Nucleic Acid
gcaaugacacagucuug

SEQ ID NO: 3445 - RNA, 17 nt, Artificial Sequence
  Description of Artificial Sequence:  Enzymatic Nucleic Acid
aaugacacagucuuggc

SEQ ID NO: 3446 - RNA, 17 nt, Artificial Sequence
  Description of Artificial Sequence:  Enzymatic Nucleic Acid
acacagucuuggcucac

SEQ ID NO: 3447 - RNA, 17 nt, Artificial Sequence
  Description of Artificial Sequence:  Enzymatic Nucleic Acid
gucuuggcucacugcaa

SEQ ID NO: 3448 - RNA, 17 nt, Artificial Sequence
  Description of Artificial Sequence:  Enzymatic Nucleic Acid
cuuggcucacugcaacu

SEQ ID NO: 3449 - RNA, 17 nt, Artificial Sequence
  Description of Artificial Sequence:  Enzymatic Nucleic Acid
uggcucacugcaacuuc

SEQ ID NO: 3450 - RNA, 17 nt, Artificial Sequence
  Description of Artificial Sequence:  Enzymatic Nucleic Acid
cucacugcaacuucugc

SEQ ID NO: 3451 - RNA, 17 nt, Artificial Sequence
  Description of Artificial Sequence:  Enzymatic Nucleic Acid
acugcaacuucugccuc

SEQ ID NO: 3452 - RNA, 17 nt, Artificial Sequence
  Description of Artificial Sequence:  Enzymatic Nucleic Acid
gcaacuucugccucuug

SEQ ID NO: 3453 - RNA, 17 nt, Artificial Sequence
  Description of Artificial Sequence:  Enzymatic Nucleic Acid
acuucugccucuugggu

SEQ ID NO: 3454 - RNA, 17 nt, Artificial Sequence
  Description of Artificial Sequence:  Enzymatic Nucleic Acid
cuucugccucuuggguu

SEQ ID NO: 3455 - RNA, 17 nt, Artificial Sequence
  Description of Artificial Sequence:  Enzymatic Nucleic Acid
ucugccucuuggguuca

SEQ ID NO: 3456 - RNA, 17 nt, Artificial Sequence
  Description of Artificial Sequence:  Enzymatic Nucleic Acid
uuggguucaagugauuc

SEQ ID NO: 3457 - RNA, 17 nt, Artificial Sequence
  Description of Artificial Sequence:  Enzymatic Nucleic Acid
agugauucuccugccuc

SEQ ID NO: 3458 - RNA, 17 nt, Artificial Sequence
  Description of Artificial Sequence:  Enzymatic Nucleic Acid
ugauucuccugccucag

SEQ ID NO: 3459 - RNA, 17 nt, Artificial Sequence
  Description of Artificial Sequence:  Enzymatic Nucleic Acid
gauucuccugccucagc

SEQ ID NO: 3460 - RNA, 17 nt, Artificial Sequence
  Description of Artificial Sequence:  Enzymatic Nucleic Acid
ucuccugccucagccuc

SEQ ID NO: 3461 - RNA, 17 nt, Artificial Sequence
  Description of Artificial Sequence:  Enzymatic Nucleic Acid
cuccugccucagccucc

SEQ ID NO: 3462 - RNA, 17 nt, Artificial Sequence
  Description of Artificial Sequence:  Enzymatic Nucleic Acid
ccugccucagccuccug

SEQ ID NO: 3463 - RNA, 17 nt, Artificial Sequence
  Description of Artificial Sequence:  Enzymatic Nucleic Acid
gccucagccuccugagu

SEQ ID NO: 3464 - RNA, 17 nt, Artificial Sequence
  Description of Artificial Sequence:  Enzymatic Nucleic Acid
ccucagccuccugagua

SEQ ID NO: 3465 - RNA, 17 nt, Artificial Sequence
  Description of Artificial Sequence:  Enzymatic Nucleic Acid
ucagccuccugaguagc

SEQ ID NO: 3466 - RNA, 17 nt, Artificial Sequence
  Description of Artificial Sequence:  Enzymatic Nucleic Acid
cagccuccugaguagcu

SEQ ID NO: 3467 - RNA, 17 nt, Artificial Sequence
  Description of Artificial Sequence:  Enzymatic Nucleic Acid
ugaguagcuggauuaca

SEQ ID NO: 3468 - RNA, 17 nt, Artificial Sequence
  Description of Artificial Sequence:  Enzymatic Nucleic Acid
uggauuacaggcaugug

SEQ ID NO: 3469 - RNA, 17 nt, Artificial Sequence
  Description of Artificial Sequence:  Enzymatic Nucleic Acid
uuacaggcaugugccac

SEQ ID NO: 3470 - RNA, 17 nt, Artificial Sequence
  Description of Artificial Sequence:  Enzymatic Nucleic Acid
gcaugugccacccaccc

SEQ ID NO: 3471 - RNA, 17 nt, Artificial Sequence
  Description of Artificial Sequence:  Enzymatic Nucleic Acid
caugugccacccaccca

SEQ ID NO: 3472 - RNA, 17 nt, Artificial Sequence
  Description of Artificial Sequence:  Enzymatic Nucleic Acid
ugugccacccacccaac

SEQ ID NO: 3473 - RNA, 17 nt, Artificial Sequence
  Description of Artificial Sequence:  Enzymatic Nucleic Acid
gugccacccacccaacu

SEQ ID NO: 3474 - RNA, 17 nt, Artificial Sequence
  Description of Artificial Sequence:  Enzymatic Nucleic Acid
ugccacccacccaacua

SEQ ID NO: 3475 - RNA, 17 nt, Artificial Sequence
  Description of Artificial Sequence:  Enzymatic Nucleic Acid
ccacccacccaacuaau

SEQ ID NO: 3476 - RNA, 17 nt, Artificial Sequence
  Description of Artificial Sequence:  Enzymatic Nucleic Acid
cacccacccaacuaauu

SEQ ID NO: 3477 - RNA, 17 nt, Artificial Sequence
  Description of Artificial Sequence:  Enzymatic Nucleic Acid
acccacccaacuaauuu

SEQ ID NO: 3478 - RNA, 17 nt, Artificial Sequence
  Description of Artificial Sequence:  Enzymatic Nucleic Acid
cacccaacuaauuuuug

SEQ ID NO: 3479 - RNA, 17 nt, Artificial Sequence
  Description of Artificial Sequence:  Enzymatic Nucleic Acid
auaaagacaggguuuca

SEQ ID NO: 3480 - RNA, 17 nt, Artificial Sequence
  Description of Artificial Sequence:  Enzymatic Nucleic Acid
aggguuucaccauguug

SEQ ID NO: 3481 - RNA, 17 nt, Artificial Sequence
  Description of Artificial Sequence:  Enzymatic Nucleic Acid
gguuucaccauguuggc

SEQ ID NO: 3482 - RNA, 17 nt, Artificial Sequence
  Description of Artificial Sequence:  Enzymatic Nucleic Acid
guuucaccauguuggcc

SEQ ID NO: 3483 - RNA, 17 nt, Artificial Sequence
  Description of Artificial Sequence:  Enzymatic Nucleic Acid
auguuggccaggcuggu

SEQ ID NO: 3484 - RNA, 17 nt, Artificial Sequence
  Description of Artificial Sequence:  Enzymatic Nucleic Acid
uguuggccaggcugguc

SEQ ID NO: 3485 - RNA, 17 nt, Artificial Sequence
  Description of Artificial Sequence:  Enzymatic Nucleic Acid
ggccaggcuggucucaa

SEQ ID NO: 3486 - RNA, 17 nt, Artificial Sequence
  Description of Artificial Sequence:  Enzymatic Nucleic Acid
ggcuggucucaaacucc

SEQ ID NO: 3487 - RNA, 17 nt, Artificial Sequence
  Description of Artificial Sequence:  Enzymatic Nucleic Acid
cuggucucaaacuccug

SEQ ID NO: 3488 - RNA, 17 nt, Artificial Sequence
  Description of Artificial Sequence:  Enzymatic Nucleic Acid
ucucaaacuccugaccu

SEQ ID NO: 3489 - RNA, 17 nt, Artificial Sequence
  Description of Artificial Sequence:  Enzymatic Nucleic Acid
ucaaacuccugaccuca

SEQ ID NO: 3490 - RNA, 17 nt, Artificial Sequence
  Description of Artificial Sequence:  Enzymatic Nucleic Acid
caaacuccugaccucaa

SEQ ID NO: 3491 - RNA, 17 nt, Artificial Sequence
  Description of Artificial Sequence:  Enzymatic Nucleic Acid
cuccugaccucaaguaa

SEQ ID NO: 3492 - RNA, 17 nt, Artificial Sequence
  Description of Artificial Sequence:  Enzymatic Nucleic Acid
uccugaccucaaguaau

SEQ ID NO: 3493 - RNA, 17 nt, Artificial Sequence
  Description of Artificial Sequence:  Enzymatic Nucleic Acid
cugaccucaaguaaucc

SEQ ID NO: 3494 - RNA, 17 nt, Artificial Sequence
  Description of Artificial Sequence:  Enzymatic Nucleic Acid
aaguaauccaccugccu

SEQ ID NO: 3495 - RNA, 17 nt, Artificial Sequence
  Description of Artificial Sequence:  Enzymatic Nucleic Acid
aguaauccaccugccuc

SEQ ID NO: 3496 - RNA, 17 nt, Artificial Sequence
  Description of Artificial Sequence:  Enzymatic Nucleic Acid
uaauccaccugccucgg

SEQ ID NO: 3497 - RNA, 17 nt, Artificial Sequence
  Description of Artificial Sequence:  Enzymatic Nucleic Acid
aauccaccugccucggc

SEQ ID NO: 3498 - RNA, 17 nt, Artificial Sequence
  Description of Artificial Sequence:  Enzymatic Nucleic Acid
ccaccugccucggccuc

SEQ ID NO: 3499 - RNA, 17 nt, Artificial Sequence
  Description of Artificial Sequence:  Enzymatic Nucleic Acid
caccugccucggccucc

SEQ ID NO: 3500 - RNA, 17 nt, Artificial Sequence
  Description of Artificial Sequence:  Enzymatic Nucleic Acid
gccucggccucccaaag

SEQ ID NO: 3501 - RNA, 17 nt, Artificial Sequence
  Description of Artificial Sequence:  Enzymatic Nucleic Acid
ccucggccucccaaagu

SEQ ID NO: 3502 - RNA, 17 nt, Artificial Sequence
  Description of Artificial Sequence:  Enzymatic Nucleic Acid
ucggccucccaaagugc

SEQ ID NO: 3503 - RNA, 17 nt, Artificial Sequence
  Description of Artificial Sequence:  Enzymatic Nucleic Acid
cggccucccaaagugcu

SEQ ID NO: 3504 - RNA, 17 nt, Artificial Sequence
  Description of Artificial Sequence:  Enzymatic Nucleic Acid
ggccucccaaagugcug

SEQ ID NO: 3505 - RNA, 17 nt, Artificial Sequence
  Description of Artificial Sequence:  Enzymatic Nucleic Acid
caaagugcugggauuac

SEQ ID NO: 3506 - RNA, 17 nt, Artificial Sequence
  Description of Artificial Sequence:  Enzymatic Nucleic Acid
gggauuacagggaugag

SEQ ID NO: 3507 - RNA, 17 nt, Artificial Sequence
  Description of Artificial Sequence:  Enzymatic Nucleic Acid
ggaugagccaccgcgcc

SEQ ID NO: 3508 - RNA, 17 nt, Artificial Sequence
  Description of Artificial Sequence:  Enzymatic Nucleic Acid
gaugagccaccgcgccc

SEQ ID NO: 3509 - RNA, 17 nt, Artificial Sequence
  Description of Artificial Sequence:  Enzymatic Nucleic Acid
ugagccaccgcgcccag

SEQ ID NO: 3510 - RNA, 17 nt, Artificial Sequence
  Description of Artificial Sequence:  Enzymatic Nucleic Acid
caccgcgcccagccuca

SEQ ID NO: 3511 - RNA, 17 nt, Artificial Sequence
  Description of Artificial Sequence:  Enzymatic Nucleic Acid
accgcgcccagccucau

SEQ ID NO: 3512 - RNA, 17 nt, Artificial Sequence
  Description of Artificial Sequence:  Enzymatic Nucleic Acid
ccgcgcccagccucauc

SEQ ID NO: 3513 - RNA, 17 nt, Artificial Sequence
  Description of Artificial Sequence:  Enzymatic Nucleic Acid
cgcccagccucaucucu

SEQ ID NO: 3514 - RNA, 17 nt, Artificial Sequence
  Description of Artificial Sequence:  Enzymatic Nucleic Acid
gcccagccucaucucuu

SEQ ID NO: 3515 - RNA, 17 nt, Artificial Sequence
  Description of Artificial Sequence:  Enzymatic Nucleic Acid
ccagccucaucucuuug

SEQ ID NO: 3516 - RNA, 17 nt, Artificial Sequence
  Description of Artificial Sequence:  Enzymatic Nucleic Acid
gccucaucucuuuguuc

SEQ ID NO: 3517 - RNA, 17 nt, Artificial Sequence
  Description of Artificial Sequence:  Enzymatic Nucleic Acid
cucaucucuuuguucua

SEQ ID NO: 3518 - RNA, 17 nt, Artificial Sequence
  Description of Artificial Sequence:  Enzymatic Nucleic Acid
cuuuguucuaaagaugg

SEQ ID NO: 3519 - RNA, 17 nt, Artificial Sequence
  Description of Artificial Sequence:  Enzymatic Nucleic Acid
ggaaaaaccacccccaa

SEQ ID NO: 3520 - RNA, 17 nt, Artificial Sequence
  Description of Artificial Sequence:  Enzymatic Nucleic Acid
gaaaaaccacccccaaa

SEQ ID NO: 3521 - RNA, 17 nt, Artificial Sequence
  Description of Artificial Sequence:  Enzymatic Nucleic Acid
aaaaccacccccaaauu

SEQ ID NO: 3522 - RNA, 17 nt, Artificial Sequence
  Description of Artificial Sequence:  Enzymatic Nucleic Acid
aaaccacccccaaauuu

SEQ ID NO: 3523 - RNA, 17 nt, Artificial Sequence
  Description of Artificial Sequence:  Enzymatic Nucleic Acid
aaccacccccaaauuuu

SEQ ID NO: 3524 - RNA, 17 nt, Artificial Sequence
  Description of Artificial Sequence:  Enzymatic Nucleic Acid
accacccccaaauuuuc

SEQ ID NO: 3525 - RNA, 17 nt, Artificial Sequence
  Description of Artificial Sequence:  Enzymatic Nucleic Acid
ccacccccaaauuuucu

SEQ ID NO: 3526 - RNA, 17 nt, Artificial Sequence
  Description of Artificial Sequence:  Enzymatic Nucleic Acid
aaauuuucuuuuuauac

SEQ ID NO: 3527 - RNA, 17 nt, Artificial Sequence
  Description of Artificial Sequence:  Enzymatic Nucleic Acid
uuuuauacuauuaauga

SEQ ID NO: 3528 - RNA, 17 nt, Artificial Sequence
  Description of Artificial Sequence:  Enzymatic Nucleic Acid
aaugaaucaaucaauuc

SEQ ID NO: 3529 - RNA, 17 nt, Artificial Sequence
  Description of Artificial Sequence:  Enzymatic Nucleic Acid
aaucaaucaauucauau

SEQ ID NO: 3530 - RNA, 17 nt, Artificial Sequence
  Description of Artificial Sequence:  Enzymatic Nucleic Acid
aucaauucauaucuauu

SEQ ID NO: 3531 - RNA, 17 nt, Artificial Sequence
  Description of Artificial Sequence:  Enzymatic Nucleic Acid
uucauaucuauuuauua

SEQ ID NO: 3532 - RNA, 17 nt, Artificial Sequence
  Description of Artificial Sequence:  Enzymatic Nucleic Acid
uaaauuucuaccgcuuu

SEQ ID NO: 3533 - RNA, 17 nt, Artificial Sequence
  Description of Artificial Sequence:  Enzymatic Nucleic Acid
auuucuaccgcuuuuag

SEQ ID NO: 3534 - RNA, 17 nt, Artificial Sequence
  Description of Artificial Sequence:  Enzymatic Nucleic Acid
ucuaccgcuuuuaggcc

SEQ ID NO: 3535 - RNA, 17 nt, Artificial Sequence
  Description of Artificial Sequence:  Enzymatic Nucleic Acid
uuuuaggccaaaaaaau

SEQ ID NO: 3536 - RNA, 17 nt, Artificial Sequence
  Description of Artificial Sequence:  Enzymatic Nucleic Acid
uuuaggccaaaaaaaug

SEQ ID NO: 3537 - RNA, 17 nt, Artificial Sequence
  Description of Artificial Sequence:  Enzymatic Nucleic Acid
gaucguucucugccuca

SEQ ID NO: 3538 - RNA, 17 nt, Artificial Sequence
  Description of Artificial Sequence:  Enzymatic Nucleic Acid
ucguucucugccucaca

SEQ ID NO: 3539 - RNA, 17 nt, Artificial Sequence
  Description of Artificial Sequence:  Enzymatic Nucleic Acid
uucucugccucacauag

SEQ ID NO: 3540 - RNA, 17 nt, Artificial Sequence
  Description of Artificial Sequence:  Enzymatic Nucleic Acid
ucucugccucacauagc

SEQ ID NO: 3541 - RNA, 17 nt, Artificial Sequence
  Description of Artificial Sequence:  Enzymatic Nucleic Acid
ucugccucacauagcuu

SEQ ID NO: 3542 - RNA, 17 nt, Artificial Sequence
  Description of Artificial Sequence:  Enzymatic Nucleic Acid
ugccucacauagcuuac

SEQ ID NO: 3543 - RNA, 17 nt, Artificial Sequence
  Description of Artificial Sequence:  Enzymatic Nucleic Acid
cacauagcuuacaagcc

SEQ ID NO: 3544 - RNA, 17 nt, Artificial Sequence
  Description of Artificial Sequence:  Enzymatic Nucleic Acid
uagcuuacaagccagcu

SEQ ID NO: 3545 - RNA, 17 nt, Artificial Sequence
  Description of Artificial Sequence:  Enzymatic Nucleic Acid
uuacaagccagcuggag

SEQ ID NO: 3546 - RNA, 17 nt, Artificial Sequence
  Description of Artificial Sequence:  Enzymatic Nucleic Acid
uacaagccagcuggaga

SEQ ID NO: 3547 - RNA, 17 nt, Artificial Sequence
  Description of Artificial Sequence:  Enzymatic Nucleic Acid
aagccagcuggagaaau

SEQ ID NO: 3548 - RNA, 17 nt, Artificial Sequence
  Description of Artificial Sequence:  Enzymatic Nucleic Acid
uaugguacucauuaaaa

SEQ ID NO: 3549 - RNA, 17 nt, Artificial Sequence
  Description of Artificial Sequence:  Enzymatic Nucleic Acid
ugguacucauuaaaaaa

SEQ ID NO: 3550 - RNA, 17 nt, Artificial Sequence
  Description of Artificial Sequence:  Enzymatic Nucleic Acid
cggcggcggcggcgcag

SEQ ID NO: 3551 - RNA, 17 nt, Artificial Sequence
  Description of Artificial Sequence:  Enzymatic Nucleic Acid
cggcggcggcgcaguuu

SEQ ID NO: 3552 - RNA, 17 nt, Artificial Sequence
  Description of Artificial Sequence:  Enzymatic Nucleic Acid
gcggcggcgcaguuugc

SEQ ID NO: 3553 - RNA, 17 nt, Artificial Sequence
  Description of Artificial Sequence:  Enzymatic Nucleic Acid
gcggcgcaguuugcuca

SEQ ID NO: 3554 - RNA, 17 nt, Artificial Sequence
  Description of Artificial Sequence:  Enzymatic Nucleic Acid
cgcaguuugcucauacu

SEQ ID NO: 3555 - RNA, 17 nt, Artificial Sequence
  Description of Artificial Sequence:  Enzymatic Nucleic Acid
cauacuuugugacuugc

SEQ ID NO: 3556 - RNA, 17 nt, Artificial Sequence
  Description of Artificial Sequence:  Enzymatic Nucleic Acid
ugugacuugcggucaca

SEQ ID NO: 3557 - RNA, 17 nt, Artificial Sequence
  Description of Artificial Sequence:  Enzymatic Nucleic Acid
gacuugcggucacagug

SEQ ID NO: 3558 - RNA, 17 nt, Artificial Sequence
  Description of Artificial Sequence:  Enzymatic Nucleic Acid
cggucacaguggcauuc

SEQ ID NO: 3559 - RNA, 17 nt, Artificial Sequence
  Description of Artificial Sequence:  Enzymatic Nucleic Acid
ucacaguggcauucagc

SEQ ID NO: 3560 - RNA, 17 nt, Artificial Sequence
  Description of Artificial Sequence:  Enzymatic Nucleic Acid
ggcauucagcuccacac

SEQ ID NO: 3561 - RNA, 17 nt, Artificial Sequence
  Description of Artificial Sequence:  Enzymatic Nucleic Acid
cacacuugguagaacca

SEQ ID NO: 3562 - RNA, 17 nt, Artificial Sequence
  Description of Artificial Sequence:  Enzymatic Nucleic Acid
aaccacaggcacgacaa

SEQ ID NO: 3563 - RNA, 17 nt, Artificial Sequence
  Description of Artificial Sequence:  Enzymatic Nucleic Acid
cacgacaagcauagaaa

SEQ ID NO: 3564 - RNA, 17 nt, Artificial Sequence
  Description of Artificial Sequence:  Enzymatic Nucleic Acid
ucaucgaggcaucgagg

SEQ ID NO: 3565 - RNA, 17 nt, Artificial Sequence
  Description of Artificial Sequence:  Enzymatic Nucleic Acid
gcaucgagguccauccc

SEQ ID NO: 3566 - RNA, 17 nt, Artificial Sequence
  Description of Artificial Sequence:  Enzymatic Nucleic Acid
agacccuggcuaucaua

SEQ ID NO: 3567 - RNA, 17 nt, Artificial Sequence
  Description of Artificial Sequence:  Enzymatic Nucleic Acid
agaccuuagucuucgcu

SEQ ID NO: 3568 - RNA, 17 nt, Artificial Sequence
  Description of Artificial Sequence:  Enzymatic Nucleic Acid
uagucuucgcugguaua

SEQ ID NO: 3569 - RNA, 17 nt, Artificial Sequence
  Description of Artificial Sequence:  Enzymatic Nucleic Acid
cuucgcugguauacucg

SEQ ID NO: 3570 - RNA, 17 nt, Artificial Sequence
  Description of Artificial Sequence:  Enzymatic Nucleic Acid
guauacucgcugucugu

SEQ ID NO: 3571 - RNA, 17 nt, Artificial Sequence
  Description of Artificial Sequence:  Enzymatic Nucleic Acid
uacucgcugucugucaa

SEQ ID NO: 3572 - RNA, 17 nt, Artificial Sequence
  Description of Artificial Sequence:  Enzymatic Nucleic Acid
cgcugucugucaaccag

SEQ ID NO: 3573 - RNA, 17 nt, Artificial Sequence
  Description of Artificial Sequence:  Enzymatic Nucleic Acid
gucaaccagcgguugac

SEQ ID NO: 3574 - RNA, 17 nt, Artificial Sequence
  Description of Artificial Sequence:  Enzymatic Nucleic Acid
aaccagcgguugacuuu

SEQ ID NO: 3575 - RNA, 17 nt, Artificial Sequence
  Description of Artificial Sequence:  Enzymatic Nucleic Acid
uuuuuuaagccuucuuu

SEQ ID NO: 3576 - RNA, 17 nt, Artificial Sequence
  Description of Artificial Sequence:  Enzymatic Nucleic Acid
uuuuaccaguuucugga

SEQ ID NO: 3577 - RNA, 17 nt, Artificial Sequence
  Description of Artificial Sequence:  Enzymatic Nucleic Acid
uuucuggagcaaauuca

SEQ ID NO: 3578 - RNA, 17 nt, Artificial Sequence
  Description of Artificial Sequence:  Enzymatic Nucleic Acid
caaauucaguuugccuu

SEQ ID NO: 3579 - RNA, 17 nt, Artificial Sequence
  Description of Artificial Sequence:  Enzymatic Nucleic Acid
uucaguuugccuuccug

SEQ ID NO: 3580 - RNA, 17 nt, Artificial Sequence
  Description of Artificial Sequence:  Enzymatic Nucleic Acid
cuggauuuguaaauugu

SEQ ID NO: 3581 - RNA, 17 nt, Artificial Sequence
  Description of Artificial Sequence:  Enzymatic Nucleic Acid
uguaaauuguaaugacc

SEQ ID NO: 3582 - RNA, 17 nt, Artificial Sequence
  Description of Artificial Sequence:  Enzymatic Nucleic Acid
aaacuuuagcaguucuu

SEQ ID NO: 3583 - RNA, 17 nt, Artificial Sequence
  Description of Artificial Sequence:  Enzymatic Nucleic Acid
cuuuagcaguucuucca

SEQ ID NO: 3584 - RNA, 17 nt, Artificial Sequence
  Description of Artificial Sequence:  Enzymatic Nucleic Acid
ugacucagguuugcuuc

SEQ ID NO: 3585 - RNA, 17 nt, Artificial Sequence
  Description of Artificial Sequence:  Enzymatic Nucleic Acid
ucagguuugcuucucug

SEQ ID NO: 3586 - RNA, 17 nt, Artificial Sequence
  Description of Artificial Sequence:  Enzymatic Nucleic Acid
cuucucuggcggucuuc

SEQ ID NO: 3587 - RNA, 17 nt, Artificial Sequence
  Description of Artificial Sequence:  Enzymatic Nucleic Acid
cucuggcggucuucaga

SEQ ID NO: 3588 - RNA, 17 nt, Artificial Sequence
  Description of Artificial Sequence:  Enzymatic Nucleic Acid
acacuuccgugauuauc

SEQ ID NO: 3589 - RNA, 17 nt, Artificial Sequence
  Description of Artificial Sequence:  Enzymatic Nucleic Acid
gauuaucugcgugcauu

SEQ ID NO: 3590 - RNA, 17 nt, Artificial Sequence
  Description of Artificial Sequence:  Enzymatic Nucleic Acid
uuaucugcgugcauuuu

SEQ ID NO: 3591 - RNA, 17 nt, Artificial Sequence
  Description of Artificial Sequence:  Enzymatic Nucleic Acid
aucugcgugcauuuugg

SEQ ID NO: 3592 - RNA, 17 nt, Artificial Sequence
  Description of Artificial Sequence:  Enzymatic Nucleic Acid
uggacaaagcuuccaac

SEQ ID NO: 3593 - RNA, 17 nt, Artificial Sequence
  Description of Artificial Sequence:  Enzymatic Nucleic Acid
aagaaauggcuggugau

SEQ ID NO: 3594 - RNA, 17 nt, Artificial Sequence
  Description of Artificial Sequence:  Enzymatic Nucleic Acid
aauggcuggugaucuuu

SEQ ID NO: 3595 - RNA, 17 nt, Artificial Sequence
  Description of Artificial Sequence:  Enzymatic Nucleic Acid
aucuuucagcagguuuc

SEQ ID NO: 3596 - RNA, 17 nt, Artificial Sequence
  Description of Artificial Sequence:  Enzymatic Nucleic Acid
uucagcagguuucuuca

SEQ ID NO: 3597 - RNA, 17 nt, Artificial Sequence
  Description of Artificial Sequence:  Enzymatic Nucleic Acid
uacauaccgucagaagc

SEQ ID NO: 3598 - RNA, 17 nt, Artificial Sequence
  Description of Artificial Sequence:  Enzymatic Nucleic Acid
cgucagaagcagggagu

SEQ ID NO: 3599 - RNA, 17 nt, Artificial Sequence
  Description of Artificial Sequence:  Enzymatic Nucleic Acid
agcagggaguaguacuu

SEQ ID NO: 3600 - RNA, 17 nt, Artificial Sequence
  Description of Artificial Sequence:  Enzymatic Nucleic Acid
agggaguaguacuuaaa

SEQ ID NO: 3601 - RNA, 17 nt, Artificial Sequence
  Description of Artificial Sequence:  Enzymatic Nucleic Acid
caagaacugccuaauuc

SEQ ID NO: 3602 - RNA, 17 nt, Artificial Sequence
  Description of Artificial Sequence:  Enzymatic Nucleic Acid
gauaggagguuuacauu

SEQ ID NO: 3603 - RNA, 17 nt, Artificial Sequence
  Description of Artificial Sequence:  Enzymatic Nucleic Acid
cauuucaaguuauaaua

SEQ ID NO: 3604 - RNA, 17 nt, Artificial Sequence
  Description of Artificial Sequence:  Enzymatic Nucleic Acid
uccagaaggugaaggua

SEQ ID NO: 3605 - RNA, 17 nt, Artificial Sequence
  Description of Artificial Sequence:  Enzymatic Nucleic Acid
aggugaagguagaucaa

SEQ ID NO: 3606 - RNA, 17 nt, Artificial Sequence
  Description of Artificial Sequence:  Enzymatic Nucleic Acid
agaaggaagcaaaaaau

SEQ ID NO: 3607 - RNA, 17 nt, Artificial Sequence
  Description of Artificial Sequence:  Enzymatic Nucleic Acid
caaaaaaugccgcagcc

SEQ ID NO: 3608 - RNA, 17 nt, Artificial Sequence
  Description of Artificial Sequence:  Enzymatic Nucleic Acid
aaaaugccgcagccaaa

SEQ ID NO: 3609 - RNA, 17 nt, Artificial Sequence
  Description of Artificial Sequence:  Enzymatic Nucleic Acid
augccgcagccaaauua

SEQ ID NO: 3610 - RNA, 17 nt, Artificial Sequence
  Description of Artificial Sequence:  Enzymatic Nucleic Acid
ccaaauuagcuguugag

SEQ ID NO: 3611 - RNA, 17 nt, Artificial Sequence
  Description of Artificial Sequence:  Enzymatic Nucleic Acid
aauuagcuguugagaua

SEQ ID NO: 3612 - RNA, 17 nt, Artificial Sequence
  Description of Artificial Sequence:  Enzymatic Nucleic Acid
aaaagaaggcaguuagu

SEQ ID NO: 3613 - RNA, 17 nt, Artificial Sequence
  Description of Artificial Sequence:  Enzymatic Nucleic Acid
agaaggcaguuaguccu

SEQ ID NO: 3614 - RNA, 17 nt, Artificial Sequence
  Description of Artificial Sequence:  Enzymatic Nucleic Acid
ggcaguuaguccuuuau

SEQ ID NO: 3615 - RNA, 17 nt, Artificial Sequence
  Description of Artificial Sequence:  Enzymatic Nucleic Acid
uuacauaggccuuauca

SEQ ID NO: 3616 - RNA, 17 nt, Artificial Sequence
  Description of Artificial Sequence:  Enzymatic Nucleic Acid
auagaauugcccagaag

SEQ ID NO: 3617 - RNA, 17 nt, Artificial Sequence
  Description of Artificial Sequence:  Enzymatic Nucleic Acid
gacuaacuguaaauuau

SEQ ID NO: 3618 - RNA, 17 nt, Artificial Sequence
  Description of Artificial Sequence:  Enzymatic Nucleic Acid
uaugaacagugugcauc

SEQ ID NO: 3619 - RNA, 17 nt, Artificial Sequence
  Description of Artificial Sequence:  Enzymatic Nucleic Acid
ugaacagugugcaucgg

SEQ ID NO: 3620 - RNA, 17 nt, Artificial Sequence
  Description of Artificial Sequence:  Enzymatic Nucleic Acid
aacagugugcaucgggg

SEQ ID NO: 3621 - RNA, 17 nt, Artificial Sequence
  Description of Artificial Sequence:  Enzymatic Nucleic Acid
caucgggggugcauggg

SEQ ID NO: 3622 - RNA, 17 nt, Artificial Sequence
  Description of Artificial Sequence:  Enzymatic Nucleic Acid
ucgggggugcaugggcc

SEQ ID NO: 3623 - RNA, 17 nt, Artificial Sequence
  Description of Artificial Sequence:  Enzymatic Nucleic Acid
gugcaugggccagaagg

SEQ ID NO: 3624 - RNA, 17 nt, Artificial Sequence
  Description of Artificial Sequence:  Enzymatic Nucleic Acid
uuauaaaugcaaaaugg

SEQ ID NO: 3625 - RNA, 17 nt, Artificial Sequence
  Description of Artificial Sequence:  Enzymatic Nucleic Acid
agaauauaguauuggua

SEQ ID NO: 3626 - RNA, 17 nt, Artificial Sequence
  Description of Artificial Sequence:  Enzymatic Nucleic Acid
uaguauugguacagguu

SEQ ID NO: 3627 - RNA, 17 nt, Artificial Sequence
  Description of Artificial Sequence:  Enzymatic Nucleic Acid
ugguacagguucuacua

SEQ ID NO: 3628 - RNA, 17 nt, Artificial Sequence
  Description of Artificial Sequence:  Enzymatic Nucleic Acid
aacaggaagcaaaacaa

SEQ ID NO: 3629 - RNA, 17 nt, Artificial Sequence
  Description of Artificial Sequence:  Enzymatic Nucleic Acid
aacaauuggccgcuaaa

SEQ ID NO: 3630 - RNA, 17 nt, Artificial Sequence
  Description of Artificial Sequence:  Enzymatic Nucleic Acid
aauuggccgcuaaacuu

SEQ ID NO: 3631 - RNA, 17 nt, Artificial Sequence
  Description of Artificial Sequence:  Enzymatic Nucleic Acid
cuaaacuugcauaucuu

SEQ ID NO: 3632 - RNA, 17 nt, Artificial Sequence
  Description of Artificial Sequence:  Enzymatic Nucleic Acid
aaaccucagugaaaucu

SEQ ID NO: 3633 - RNA, 17 nt, Artificial Sequence
  Description of Artificial Sequence:  Enzymatic Nucleic Acid
gacuaccuguccucugg

SEQ ID NO: 3634 - RNA, 17 nt, Artificial Sequence
  Description of Artificial Sequence:  Enzymatic Nucleic Acid
guccucugguucuuuug

SEQ ID NO: 3635 - RNA, 17 nt, Artificial Sequence
  Description of Artificial Sequence:  Enzymatic Nucleic Acid
guucuuuugcuacuacg

SEQ ID NO: 3636 - RNA, 17 nt, Artificial Sequence
  Description of Artificial Sequence:  Enzymatic Nucleic Acid
gcuacuacgugugaguc

SEQ ID NO: 3637 - RNA, 17 nt, Artificial Sequence
  Description of Artificial Sequence:  Enzymatic Nucleic Acid
uacuacgugugaguccc

SEQ ID NO: 3638 - RNA, 17 nt, Artificial Sequence
  Description of Artificial Sequence:  Enzymatic Nucleic Acid
acgugugagucccaaag

SEQ ID NO: 3639 - RNA, 17 nt, Artificial Sequence
  Description of Artificial Sequence:  Enzymatic Nucleic Acid
gucccaaagcaacucuu

SEQ ID NO: 3640 - RNA, 17 nt, Artificial Sequence
  Description of Artificial Sequence:  Enzymatic Nucleic Acid
acucuuuagugaccagc

SEQ ID NO: 3641 - RNA, 17 nt, Artificial Sequence
  Description of Artificial Sequence:  Enzymatic Nucleic Acid
agugaccagcacacucg

SEQ ID NO: 3642 - RNA, 17 nt, Artificial Sequence
  Description of Artificial Sequence:  Enzymatic Nucleic Acid
gcacacucgcuucugaa

SEQ ID NO: 3643 - RNA, 17 nt, Artificial Sequence
  Description of Artificial Sequence:  Enzymatic Nucleic Acid
aucugaaggugacuucu

SEQ ID NO: 3644 - RNA, 17 nt, Artificial Sequence
  Description of Artificial Sequence:  Enzymatic Nucleic Acid
acuucucagcagauaca

SEQ ID NO: 3645 - RNA, 17 nt, Artificial Sequence
  Description of Artificial Sequence:  Enzymatic Nucleic Acid
uucuaacagugacaguu

SEQ ID NO: 3646 - RNA, 17 nt, Artificial Sequence
  Description of Artificial Sequence:  Enzymatic Nucleic Acid
cagugacaguuuaaaca

SEQ ID NO: 3647 - RNA, 17 nt, Artificial Sequence
  Description of Artificial Sequence:  Enzymatic Nucleic Acid
uuuaaacaguucuucgu

SEQ ID NO: 3648 - RNA, 17 nt, Artificial Sequence
  Description of Artificial Sequence:  Enzymatic Nucleic Acid
aguucuucguugcuuau

SEQ ID NO: 3649 - RNA, 17 nt, Artificial Sequence
  Description of Artificial Sequence:  Enzymatic Nucleic Acid
ucuucguugcuuaugaa

SEQ ID NO: 3650 - RNA, 17 nt, Artificial Sequence
  Description of Artificial Sequence:  Enzymatic Nucleic Acid
uaugaauggucucagaa

SEQ ID NO: 3651 - RNA, 17 nt, Artificial Sequence
  Description of Artificial Sequence:  Enzymatic Nucleic Acid
aaaggaaggcaaaaaga

SEQ ID NO: 3652 - RNA, 17 nt, Artificial Sequence
  Description of Artificial Sequence:  Enzymatic Nucleic Acid
gaucuuuggcacccaga

SEQ ID NO: 3653 - RNA, 17 nt, Artificial Sequence
  Description of Artificial Sequence:  Enzymatic Nucleic Acid
gaaacaaaguauacugu

SEQ ID NO: 3654 - RNA, 17 nt, Artificial Sequence
  Description of Artificial Sequence:  Enzymatic Nucleic Acid
aguauacuguggacaag

SEQ ID NO: 3655 - RNA, 17 nt, Artificial Sequence
  Description of Artificial Sequence:  Enzymatic Nucleic Acid
gacaagagguuuggcau

SEQ ID NO: 3656 - RNA, 17 nt, Artificial Sequence
  Description of Artificial Sequence:  Enzymatic Nucleic Acid
gagguuuggcauggauu

SEQ ID NO: 3657 - RNA, 17 nt, Artificial Sequence
  Description of Artificial Sequence:  Enzymatic Nucleic Acid
auuaauuggcucaggug

SEQ ID NO: 3658 - RNA, 17 nt, Artificial Sequence
  Description of Artificial Sequence:  Enzymatic Nucleic Acid
uggcucagguggauuug

SEQ ID NO: 3659 - RNA, 17 nt, Artificial Sequence
  Description of Artificial Sequence:  Enzymatic Nucleic Acid
uggauuuggccaaguuu

SEQ ID NO: 3660 - RNA, 17 nt, Artificial Sequence
  Description of Artificial Sequence:  Enzymatic Nucleic Acid
uuggccaaguuuucaaa

SEQ ID NO: 3661 - RNA, 17 nt, Artificial Sequence
  Description of Artificial Sequence:  Enzymatic Nucleic Acid
uuuucaaagcaaaacac

SEQ ID NO: 3662 - RNA, 17 nt, Artificial Sequence
  Description of Artificial Sequence:  Enzymatic Nucleic Acid
agacuuacguuauuaaa

SEQ ID NO: 3663 - RNA, 17 nt, Artificial Sequence
  Description of Artificial Sequence:  Enzymatic Nucleic Acid
uauuaaacguguuaaau

SEQ ID NO: 3664 - RNA, 17 nt, Artificial Sequence
  Description of Artificial Sequence:  Enzymatic Nucleic Acid
uuaaacguguuaaauau

SEQ ID NO: 3665 - RNA, 17 nt, Artificial Sequence
  Description of Artificial Sequence:  Enzymatic Nucleic Acid
acgagaaggcggagcgu

SEQ ID NO: 3666 - RNA, 17 nt, Artificial Sequence
  Description of Artificial Sequence:  Enzymatic Nucleic Acid
aaggcggagcgugaagu

SEQ ID NO: 3667 - RNA, 17 nt, Artificial Sequence
  Description of Artificial Sequence:  Enzymatic Nucleic Acid
ggcggagcgugaaguaa

SEQ ID NO: 3668 - RNA, 17 nt, Artificial Sequence
  Description of Artificial Sequence:  Enzymatic Nucleic Acid
agcgugaaguaaaagca

SEQ ID NO: 3669 - RNA, 17 nt, Artificial Sequence
  Description of Artificial Sequence:  Enzymatic Nucleic Acid
aaguaaaagcauuggca

SEQ ID NO: 3670 - RNA, 17 nt, Artificial Sequence
  Description of Artificial Sequence:  Enzymatic Nucleic Acid
aagcauuggcaaaacuu

SEQ ID NO: 3671 - RNA, 17 nt, Artificial Sequence
  Description of Artificial Sequence:  Enzymatic Nucleic Acid
uugaucauguaaauauu

SEQ ID NO: 3672 - RNA, 17 nt, Artificial Sequence
  Description of Artificial Sequence:  Enzymatic Nucleic Acid
uaaauauuguucacuac

SEQ ID NO: 3673 - RNA, 17 nt, Artificial Sequence
  Description of Artificial Sequence:  Enzymatic Nucleic Acid
cuacaauggcuguuggg

SEQ ID NO: 3674 - RNA, 17 nt, Artificial Sequence
  Description of Artificial Sequence:  Enzymatic Nucleic Acid
caauggcuguugggaug

SEQ ID NO: 3675 - RNA, 17 nt, Artificial Sequence
  Description of Artificial Sequence:  Enzymatic Nucleic Acid
ugagaccagugaugauu

SEQ ID NO: 3676 - RNA, 17 nt, Artificial Sequence
  Description of Artificial Sequence:  Enzymatic Nucleic Acid
ucuugagagcagugauu

SEQ ID NO: 3677 - RNA, 17 nt, Artificial Sequence
  Description of Artificial Sequence:  Enzymatic Nucleic Acid
ugagagcagugauuaug

SEQ ID NO: 3678 - RNA, 17 nt, Artificial Sequence
  Description of Artificial Sequence:  Enzymatic Nucleic Acid
ugagaacagcaaaaaua

SEQ ID NO: 3679 - RNA, 17 nt, Artificial Sequence
  Description of Artificial Sequence:  Enzymatic Nucleic Acid
caaaaauaguucaaggu

SEQ ID NO: 3680 - RNA, 17 nt, Artificial Sequence
  Description of Artificial Sequence:  Enzymatic Nucleic Acid
aguucaaggucaaagac

SEQ ID NO: 3681 - RNA, 17 nt, Artificial Sequence
  Description of Artificial Sequence:  Enzymatic Nucleic Acid
aagacuaagugccuuuu

SEQ ID NO: 3682 - RNA, 17 nt, Artificial Sequence
  Description of Artificial Sequence:  Enzymatic Nucleic Acid
gacuaagugccuuuuca

SEQ ID NO: 3683 - RNA, 17 nt, Artificial Sequence
  Description of Artificial Sequence:  Enzymatic Nucleic Acid
ggaauucugugauaaag

SEQ ID NO: 3684 - RNA, 17 nt, Artificial Sequence
  Description of Artificial Sequence:  Enzymatic Nucleic Acid
aagaagaggcgagaaac

SEQ ID NO: 3685 - RNA, 17 nt, Artificial Sequence
  Description of Artificial Sequence:  Enzymatic Nucleic Acid
uagacaaaguuuuggcu

SEQ ID NO: 3686 - RNA, 17 nt, Artificial Sequence
  Description of Artificial Sequence:  Enzymatic Nucleic Acid
aaguuuuggcuuuggaa

SEQ ID NO: 3687 - RNA, 17 nt, Artificial Sequence
  Description of Artificial Sequence:  Enzymatic Nucleic Acid
caaaagggguggauuau

SEQ ID NO: 3688 - RNA, 17 nt, Artificial Sequence
  Description of Artificial Sequence:  Enzymatic Nucleic Acid
gaucuuaagccaaguaa

SEQ ID NO: 3689 - RNA, 17 nt, Artificial Sequence
  Description of Artificial Sequence:  Enzymatic Nucleic Acid
uaagccaaguaauauau

SEQ ID NO: 3690 - RNA, 17 nt, Artificial Sequence
  Description of Artificial Sequence:  Enzymatic Nucleic Acid
uauucuuaguagauaca

SEQ ID NO: 3691 - RNA, 17 nt, Artificial Sequence
  Description of Artificial Sequence:  Enzymatic Nucleic Acid
caaaacaaguaaagauu

SEQ ID NO: 3692 - RNA, 17 nt, Artificial Sequence
  Description of Artificial Sequence:  Enzymatic Nucleic Acid
uuggacuuguaacaucu

SEQ ID NO: 3693 - RNA, 17 nt, Artificial Sequence
  Description of Artificial Sequence:  Enzymatic Nucleic Acid
gauggaaagcgaacaag

SEQ ID NO: 3694 - RNA, 17 nt, Artificial Sequence
  Description of Artificial Sequence:  Enzymatic Nucleic Acid
aacaaggaguaagggaa

SEQ ID NO: 3695 - RNA, 17 nt, Artificial Sequence
  Description of Artificial Sequence:  Enzymatic Nucleic Acid
ggaacuuugcgauacau

SEQ ID NO: 3696 - RNA, 17 nt, Artificial Sequence
  Description of Artificial Sequence:  Enzymatic Nucleic Acid
auacaugagcccagaac

SEQ ID NO: 3697 - RNA, 17 nt, Artificial Sequence
  Description of Artificial Sequence:  Enzymatic Nucleic Acid
auuucuucgcaagacua

SEQ ID NO: 3698 - RNA, 17 nt, Artificial Sequence
  Description of Artificial Sequence:  Enzymatic Nucleic Acid
gaaaggaaguggaccuc

SEQ ID NO: 3699 - RNA, 17 nt, Artificial Sequence
  Description of Artificial Sequence:  Enzymatic Nucleic Acid
accucuacgcuuugggg

SEQ ID NO: 3700 - RNA, 17 nt, Artificial Sequence
  Description of Artificial Sequence:  Enzymatic Nucleic Acid
gcuuuggggcuaauucu

SEQ ID NO: 3701 - RNA, 17 nt, Artificial Sequence
  Description of Artificial Sequence:  Enzymatic Nucleic Acid
uaauucuugcugaacuu

SEQ ID NO: 3702 - RNA, 17 nt, Artificial Sequence
  Description of Artificial Sequence:  Enzymatic Nucleic Acid
uucuucauguaugugac

SEQ ID NO: 3703 - RNA, 17 nt, Artificial Sequence
  Description of Artificial Sequence:  Enzymatic Nucleic Acid
ucauguaugugacacug

SEQ ID NO: 3704 - RNA, 17 nt, Artificial Sequence
  Description of Artificial Sequence:  Enzymatic Nucleic Acid
gugacacugcuuuugaa

SEQ ID NO: 3705 - RNA, 17 nt, Artificial Sequence
  Description of Artificial Sequence:  Enzymatic Nucleic Acid
acaucaaaguuuuucac

SEQ ID NO: 3706 - RNA, 17 nt, Artificial Sequence
  Description of Artificial Sequence:  Enzymatic Nucleic Acid
acgggauggcaucaucu

SEQ ID NO: 3707 - RNA, 17 nt, Artificial Sequence
  Description of Artificial Sequence:  Enzymatic Nucleic Acid
ccuugacuguguggaag

SEQ ID NO: 3708 - RNA, 17 nt, Artificial Sequence
  Description of Artificial Sequence:  Enzymatic Nucleic Acid
uugacuguguggaagaa

SEQ ID NO: 3709 - RNA, 17 nt, Artificial Sequence
  Description of Artificial Sequence:  Enzymatic Nucleic Acid
gaagaaaagcccagaga

SEQ ID NO: 3710 - RNA, 17 nt, Artificial Sequence
  Description of Artificial Sequence:  Enzymatic Nucleic Acid
acacacauguuagagcc

SEQ ID NO: 3711 - RNA, 17 nt, Artificial Sequence
  Description of Artificial Sequence:  Enzymatic Nucleic Acid
auguuagagcccuucug

SEQ ID NO: 3712 - RNA, 17 nt, Artificial Sequence
  Description of Artificial Sequence:  Enzymatic Nucleic Acid
cugaaaaaguauccugc

SEQ ID NO: 3713 - RNA, 17 nt, Artificial Sequence
  Description of Artificial Sequence:  Enzymatic Nucleic Acid
aguauccugcuucugau

SEQ ID NO: 3714 - RNA, 17 nt, Artificial Sequence
  Description of Artificial Sequence:  Enzymatic Nucleic Acid
ucugauaugcaguuuuc

SEQ ID NO: 3715 - RNA, 17 nt, Artificial Sequence
  Description of Artificial Sequence:  Enzymatic Nucleic Acid
gauaugcaguuuuccuu

SEQ ID NO: 3716 - RNA, 17 nt, Artificial Sequence
  Description of Artificial Sequence:  Enzymatic Nucleic Acid
uaaaaucugcuagggaa

SEQ ID NO: 3717 - RNA, 17 nt, Artificial Sequence
  Description of Artificial Sequence:  Enzymatic Nucleic Acid
auuuuaauguuuccuuu

SEQ ID NO: 3718 - RNA, 17 nt, Artificial Sequence
  Description of Artificial Sequence:  Enzymatic Nucleic Acid
aucuuucugcagaaaca

SEQ ID NO: 3719 - RNA, 17 nt, Artificial Sequence
  Description of Artificial Sequence:  Enzymatic Nucleic Acid
acagaaagguuuucuuc

SEQ ID NO: 3720 - RNA, 17 nt, Artificial Sequence
  Description of Artificial Sequence:  Enzymatic Nucleic Acid
uucuuuuugcuucaaaa

SEQ ID NO: 3721 - RNA, 17 nt, Artificial Sequence
  Description of Artificial Sequence:  Enzymatic Nucleic Acid
uuuuccuggcucaucuc

SEQ ID NO: 3722 - RNA, 17 nt, Artificial Sequence
  Description of Artificial Sequence:  Enzymatic Nucleic Acid
aagacagagucucgcuc

SEQ ID NO: 3723 - RNA, 17 nt, Artificial Sequence
  Description of Artificial Sequence:  Enzymatic Nucleic Acid
agagucucgcucuguug

SEQ ID NO: 3724 - RNA, 17 nt, Artificial Sequence
  Description of Artificial Sequence:  Enzymatic Nucleic Acid
cucgcucuguugcccag

SEQ ID NO: 3725 - RNA, 17 nt, Artificial Sequence
  Description of Artificial Sequence:  Enzymatic Nucleic Acid
gcucuguugcccaggcu

SEQ ID NO: 3726 - RNA, 17 nt, Artificial Sequence
  Description of Artificial Sequence:  Enzymatic Nucleic Acid
uugcccaggcuggagug

SEQ ID NO: 3727 - RNA, 17 nt, Artificial Sequence
  Description of Artificial Sequence:  Enzymatic Nucleic Acid
aggcuggagugcaauga

SEQ ID NO: 3728 - RNA, 17 nt, Artificial Sequence
  Description of Artificial Sequence:  Enzymatic Nucleic Acid
gcuggagugcaaugaca

SEQ ID NO: 3729 - RNA, 17 nt, Artificial Sequence
  Description of Artificial Sequence:  Enzymatic Nucleic Acid
augacacagucuuggcu

SEQ ID NO: 3730 - RNA, 17 nt, Artificial Sequence
  Description of Artificial Sequence:  Enzymatic Nucleic Acid
cagucuuggcucacugc

SEQ ID NO: 3731 - RNA, 17 nt, Artificial Sequence
  Description of Artificial Sequence:  Enzymatic Nucleic Acid
ggcucacugcaacuucu

SEQ ID NO: 3732 - RNA, 17 nt, Artificial Sequence
  Description of Artificial Sequence:  Enzymatic Nucleic Acid
caacuucugccucuugg

SEQ ID NO: 3733 - RNA, 17 nt, Artificial Sequence
  Description of Artificial Sequence:  Enzymatic Nucleic Acid
ccucuuggguucaagug

SEQ ID NO: 3734 - RNA, 17 nt, Artificial Sequence
  Description of Artificial Sequence:  Enzymatic Nucleic Acid
ggguucaagugauucuc

SEQ ID NO: 3735 - RNA, 17 nt, Artificial Sequence
  Description of Artificial Sequence:  Enzymatic Nucleic Acid
auucuccugccucagcc

SEQ ID NO: 3736 - RNA, 17 nt, Artificial Sequence
  Description of Artificial Sequence:  Enzymatic Nucleic Acid
cugccucagccuccuga

SEQ ID NO: 3737 - RNA, 17 nt, Artificial Sequence
  Description of Artificial Sequence:  Enzymatic Nucleic Acid
ccuccugaguagcugga

SEQ ID NO: 3738 - RNA, 17 nt, Artificial Sequence
  Description of Artificial Sequence:  Enzymatic Nucleic Acid
ccugaguagcuggauua

SEQ ID NO: 3739 - RNA, 17 nt, Artificial Sequence
  Description of Artificial Sequence:  Enzymatic Nucleic Acid
gauuacaggcaugugcc

SEQ ID NO: 3740 - RNA, 17 nt, Artificial Sequence
  Description of Artificial Sequence:  Enzymatic Nucleic Acid
acaggcaugugccaccc

SEQ ID NO: 3741 - RNA, 17 nt, Artificial Sequence
  Description of Artificial Sequence:  Enzymatic Nucleic Acid
aggcaugugccacccac

SEQ ID NO: 3742 - RNA, 17 nt, Artificial Sequence
  Description of Artificial Sequence:  Enzymatic Nucleic Acid
uaauuuuuguguuuuua

SEQ ID NO: 3743 - RNA, 17 nt, Artificial Sequence
  Description of Artificial Sequence:  Enzymatic Nucleic Acid
auuuuuguguuuuuaau

SEQ ID NO: 3744 - RNA, 17 nt, Artificial Sequence
  Description of Artificial Sequence:  Enzymatic Nucleic Acid
aagacaggguuucacca

SEQ ID NO: 3745 - RNA, 17 nt, Artificial Sequence
  Description of Artificial Sequence:  Enzymatic Nucleic Acid
uucaccauguuggccag

SEQ ID NO: 3746 - RNA, 17 nt, Artificial Sequence
  Description of Artificial Sequence:  Enzymatic Nucleic Acid
ccauguuggccaggcug

SEQ ID NO: 3747 - RNA, 17 nt, Artificial Sequence
  Description of Artificial Sequence:  Enzymatic Nucleic Acid
uuggccaggcuggucuc

SEQ ID NO: 3748 - RNA, 17 nt, Artificial Sequence
  Description of Artificial Sequence:  Enzymatic Nucleic Acid
ccaggcuggucucaaac

SEQ ID NO: 3749 - RNA, 17 nt, Artificial Sequence
  Description of Artificial Sequence:  Enzymatic Nucleic Acid
gaccucaaguaauccac

SEQ ID NO: 3750 - RNA, 17 nt, Artificial Sequence
  Description of Artificial Sequence:  Enzymatic Nucleic Acid
auccaccugccucggcc

SEQ ID NO: 3751 - RNA, 17 nt, Artificial Sequence
  Description of Artificial Sequence:  Enzymatic Nucleic Acid
cugccucggccucccaa

SEQ ID NO: 3752 - RNA, 17 nt, Artificial Sequence
  Description of Artificial Sequence:  Enzymatic Nucleic Acid
cucccaaagugcuggga

SEQ ID NO: 3753 - RNA, 17 nt, Artificial Sequence
  Description of Artificial Sequence:  Enzymatic Nucleic Acid
cccaaagugcugggauu

SEQ ID NO: 3754 - RNA, 17 nt, Artificial Sequence
  Description of Artificial Sequence:  Enzymatic Nucleic Acid
agggaugagccaccgcg

SEQ ID NO: 3755 - RNA, 17 nt, Artificial Sequence
  Description of Artificial Sequence:  Enzymatic Nucleic Acid
gagccaccgcgcccagc

SEQ ID NO: 3756 - RNA, 17 nt, Artificial Sequence
  Description of Artificial Sequence:  Enzymatic Nucleic Acid
gccaccgcgcccagccu

SEQ ID NO: 3757 - RNA, 17 nt, Artificial Sequence
  Description of Artificial Sequence:  Enzymatic Nucleic Acid
cgcgcccagccucaucu

SEQ ID NO: 3758 - RNA, 17 nt, Artificial Sequence
  Description of Artificial Sequence:  Enzymatic Nucleic Acid
aucucuuuguucuaaag

SEQ ID NO: 3759 - RNA, 17 nt, Artificial Sequence
  Description of Artificial Sequence:  Enzymatic Nucleic Acid
uuucuaccgcuuuuagg

SEQ ID NO: 3760 - RNA, 17 nt, Artificial Sequence
  Description of Artificial Sequence:  Enzymatic Nucleic Acid
gcuuuuaggccaaaaaa

SEQ ID NO: 3761 - RNA, 17 nt, Artificial Sequence
  Description of Artificial Sequence:  Enzymatic Nucleic Acid
aaaaaaauguaagaucg

SEQ ID NO: 3762 - RNA, 17 nt, Artificial Sequence
  Description of Artificial Sequence:  Enzymatic Nucleic Acid
guaagaucguucucugc

SEQ ID NO: 3763 - RNA, 17 nt, Artificial Sequence
  Description of Artificial Sequence:  Enzymatic Nucleic Acid
cguucucugccucacau

SEQ ID NO: 3764 - RNA, 17 nt, Artificial Sequence
  Description of Artificial Sequence:  Enzymatic Nucleic Acid
cucacauagcuuacaag

SEQ ID NO: 3765 - RNA, 17 nt, Artificial Sequence
  Description of Artificial Sequence:  Enzymatic Nucleic Acid
gcuuacaagccagcugg

SEQ ID NO: 3766 - RNA, 17 nt, Artificial Sequence
  Description of Artificial Sequence:  Enzymatic Nucleic Acid
acaagccagcuggagaa

SEQ ID NO: 3767 - RNA, 17 nt, Artificial Sequence
  Description of Artificial Sequence:  Enzymatic Nucleic Acid
gaaauaugguacucauu

SEQ ID NO: 3768 - RNA, 17 nt, Artificial Sequence
  Description of Artificial Sequence:  Enzymatic Nucleic Acid
aaaaaaaagugauguac

SEQ ID NO: 3769 - RNA, 17 nt, Artificial Sequence
  Description of Artificial Sequence:  Enzymatic Nucleic Acid
acuuugugacuugcggu

SEQ ID NO: 3770 - RNA, 17 nt, Artificial Sequence
  Description of Artificial Sequence:  Enzymatic Nucleic Acid
uugguagaaccacaggc

SEQ ID NO: 3771 - RNA, 17 nt, Artificial Sequence
  Description of Artificial Sequence:  Enzymatic Nucleic Acid
caggcacgacaagcaua

SEQ ID NO: 3772 - RNA, 17 nt, Artificial Sequence
  Description of Artificial Sequence:  Enzymatic Nucleic Acid
gcauagaaacauccuaa

SEQ ID NO: 3773 - RNA, 17 nt, Artificial Sequence
  Description of Artificial Sequence:  Enzymatic Nucleic Acid
cauccuaaacaaucuuc

SEQ ID NO: 3774 - RNA, 17 nt, Artificial Sequence
  Description of Artificial Sequence:  Enzymatic Nucleic Acid
ccuaaacaaucuucauc

SEQ ID NO: 3775 - RNA, 17 nt, Artificial Sequence
  Description of Artificial Sequence:  Enzymatic Nucleic Acid
ccaucccaauaaaaauc

SEQ ID NO: 3776 - RNA, 17 nt, Artificial Sequence
  Description of Artificial Sequence:  Enzymatic Nucleic Acid
caauaaaaaucaggaga

SEQ ID NO: 3777 - RNA, 17 nt, Artificial Sequence
  Description of Artificial Sequence:  Enzymatic Nucleic Acid
aucaggagacccuggcu

SEQ ID NO: 3778 - RNA, 17 nt, Artificial Sequence
  Description of Artificial Sequence:  Enzymatic Nucleic Acid
uaucauagaccuuaguc

SEQ ID NO: 3779 - RNA, 17 nt, Artificial Sequence
  Description of Artificial Sequence:  Enzymatic Nucleic Acid
gucugucaaccagcggu

SEQ ID NO: 3780 - RNA, 17 nt, Artificial Sequence
  Description of Artificial Sequence:  Enzymatic Nucleic Acid
agcgguugacuuuuuuu

SEQ ID NO: 3781 - RNA, 17 nt, Artificial Sequence
  Description of Artificial Sequence:  Enzymatic Nucleic Acid
uggagcaaauucaguuu

SEQ ID NO: 3782 - RNA, 17 nt, Artificial Sequence
  Description of Artificial Sequence:  Enzymatic Nucleic Acid
cuuccuggauuuguaaa

SEQ ID NO: 3783 - RNA, 17 nt, Artificial Sequence
  Description of Artificial Sequence:  Enzymatic Nucleic Acid
auuuguaaauuguaaug

SEQ ID NO: 3784 - RNA, 17 nt, Artificial Sequence
  Description of Artificial Sequence:  Enzymatic Nucleic Acid
aaauuguaaugaccuca

SEQ ID NO: 3785 - RNA, 17 nt, Artificial Sequence
  Description of Artificial Sequence:  Enzymatic Nucleic Acid
uuguaaugaccucaaaa

SEQ ID NO: 3786 - RNA, 17 nt, Artificial Sequence
  Description of Artificial Sequence:  Enzymatic Nucleic Acid
accucaaaacuuuagca

SEQ ID NO: 3787 - RNA, 17 nt, Artificial Sequence
  Description of Artificial Sequence:  Enzymatic Nucleic Acid
uccaucugacucagguu

SEQ ID NO: 3788 - RNA, 17 nt, Artificial Sequence
  Description of Artificial Sequence:  Enzymatic Nucleic Acid
ucuucagaaucaacauc

SEQ ID NO: 3789 - RNA, 17 nt, Artificial Sequence
  Description of Artificial Sequence:  Enzymatic Nucleic Acid
cagaaucaacauccaca

SEQ ID NO: 3790 - RNA, 17 nt, Artificial Sequence
  Description of Artificial Sequence:  Enzymatic Nucleic Acid
cuuccgugauuaucugc

SEQ ID NO: 3791 - RNA, 17 nt, Artificial Sequence
  Description of Artificial Sequence:  Enzymatic Nucleic Acid
cauuuuggacaaagcuu

SEQ ID NO: 3792 - RNA, 17 nt, Artificial Sequence
  Description of Artificial Sequence:  Enzymatic Nucleic Acid
agcuuccaaccaggaua

SEQ ID NO: 3793 - RNA, 17 nt, Artificial Sequence
  Description of Artificial Sequence:  Enzymatic Nucleic Acid
caaccaggauacgggaa

SEQ ID NO: 3794 - RNA, 17 nt, Artificial Sequence
  Description of Artificial Sequence:  Enzymatic Nucleic Acid
aagaagaaauggcuggu

SEQ ID NO: 3795 - RNA, 17 nt, Artificial Sequence
  Description of Artificial Sequence:  Enzymatic Nucleic Acid
ggcuggugaucuuucag

SEQ ID NO: 3796 - RNA, 17 nt, Artificial Sequence
  Description of Artificial Sequence:  Enzymatic Nucleic Acid
auggaggaacuuaauac

SEQ ID NO: 3797 - RNA, 17 nt, Artificial Sequence
  Description of Artificial Sequence:  Enzymatic Nucleic Acid
ggaacuuaauacauacc

SEQ ID NO: 3798 - RNA, 17 nt, Artificial Sequence
  Description of Artificial Sequence:  Enzymatic Nucleic Acid
guacuuaaauaucaaga

SEQ ID NO: 3799 - RNA, 17 nt, Artificial Sequence
  Description of Artificial Sequence:  Enzymatic Nucleic Acid
uaucaagaacugccuaa

SEQ ID NO: 3800 - RNA, 17 nt, Artificial Sequence
  Description of Artificial Sequence:  Enzymatic Nucleic Acid
acugccuaauucaggac

SEQ ID NO: 3801 - RNA, 17 nt, Artificial Sequence
  Description of Artificial Sequence:  Enzymatic Nucleic Acid
aauucaggaccuccaca

SEQ ID NO: 3802 - RNA, 17 nt, Artificial Sequence
  Description of Artificial Sequence:  Enzymatic Nucleic Acid
uccacaugauaggaggu

SEQ ID NO: 3803 - RNA, 17 nt, Artificial Sequence
  Description of Artificial Sequence:  Enzymatic Nucleic Acid
aaguuauaauagaugga

SEQ ID NO: 3804 - RNA, 17 nt, Artificial Sequence
  Description of Artificial Sequence:  Enzymatic Nucleic Acid
uauaauagauggaagag

SEQ ID NO: 3805 - RNA, 17 nt, Artificial Sequence
  Description of Artificial Sequence:  Enzymatic Nucleic Acid
ggaagagaauuuccaga

SEQ ID NO: 3806 - RNA, 17 nt, Artificial Sequence
  Description of Artificial Sequence:  Enzymatic Nucleic Acid
gaagguagaucaaagaa

SEQ ID NO: 3807 - RNA, 17 nt, Artificial Sequence
  Description of Artificial Sequence:  Enzymatic Nucleic Acid
agcaaaaaaugccgcag

SEQ ID NO: 3808 - RNA, 17 nt, Artificial Sequence
  Description of Artificial Sequence:  Enzymatic Nucleic Acid
gcagccaaauuagcugu

SEQ ID NO: 3809 - RNA, 17 nt, Artificial Sequence
  Description of Artificial Sequence:  Enzymatic Nucleic Acid
cuguugagauacuuaau

SEQ ID NO: 3810 - RNA, 17 nt, Artificial Sequence
  Description of Artificial Sequence:  Enzymatic Nucleic Acid
gauacuuaauaaggaaa

SEQ ID NO: 3811 - RNA, 17 nt, Artificial Sequence
  Description of Artificial Sequence:  Enzymatic Nucleic Acid
uauuauugacaacaacg

SEQ ID NO: 3812 - RNA, 17 nt, Artificial Sequence
  Description of Artificial Sequence:  Enzymatic Nucleic Acid
uauugacaacaacgaau

SEQ ID NO: 3813 - RNA, 17 nt, Artificial Sequence
  Description of Artificial Sequence:  Enzymatic Nucleic Acid
ugacaacaacgaauucu

SEQ ID NO: 3814 - RNA, 17 nt, Artificial Sequence
  Description of Artificial Sequence:  Enzymatic Nucleic Acid
aacaacgaauucuucag

SEQ ID NO: 3815 - RNA, 17 nt, Artificial Sequence
  Description of Artificial Sequence:  Enzymatic Nucleic Acid
ucagaaggauuauccau

SEQ ID NO: 3816 - RNA, 17 nt, Artificial Sequence
  Description of Artificial Sequence:  Enzymatic Nucleic Acid
cauggggaauuacauag

SEQ ID NO: 3817 - RNA, 17 nt, Artificial Sequence
  Description of Artificial Sequence:  Enzymatic Nucleic Acid
ccuuaucaauagaauug

SEQ ID NO: 3818 - RNA, 17 nt, Artificial Sequence
  Description of Artificial Sequence:  Enzymatic Nucleic Acid
ucaauagaauugcccag

SEQ ID NO: 3819 - RNA, 17 nt, Artificial Sequence
  Description of Artificial Sequence:  Enzymatic Nucleic Acid
aagaaaagacuaacugu

SEQ ID NO: 3820 - RNA, 17 nt, Artificial Sequence
  Description of Artificial Sequence:  Enzymatic Nucleic Acid
aaagacuaacuguaaau

SEQ ID NO: 3821 - RNA, 17 nt, Artificial Sequence
  Description of Artificial Sequence:  Enzymatic Nucleic Acid
aacuguaaauuaugaac

SEQ ID NO: 3822 - RNA, 17 nt, Artificial Sequence
  Description of Artificial Sequence:  Enzymatic Nucleic Acid
aauuaugaacagugugc

SEQ ID NO: 3823 - RNA, 17 nt, Artificial Sequence
  Description of Artificial Sequence:  Enzymatic Nucleic Acid
ccagaaggauuucauua

SEQ ID NO: 3824 - RNA, 17 nt, Artificial Sequence
  Description of Artificial Sequence:  Enzymatic Nucleic Acid
cauuauaaaugcaaaau

SEQ ID NO: 3825 - RNA, 17 nt, Artificial Sequence
  Description of Artificial Sequence:  Enzymatic Nucleic Acid
aaugcaaaaugggacag

SEQ ID NO: 3826 - RNA, 17 nt, Artificial Sequence
  Description of Artificial Sequence:  Enzymatic Nucleic Acid
aaaaugggacagaaaga

SEQ ID NO: 3827 - RNA, 17 nt, Artificial Sequence
  Description of Artificial Sequence:  Enzymatic Nucleic Acid
cagaaagaauauaguau

SEQ ID NO: 3828 - RNA, 17 nt, Artificial Sequence
  Description of Artificial Sequence:  Enzymatic Nucleic Acid
ucuacuaaacaggaagc

SEQ ID NO: 3829 - RNA, 17 nt, Artificial Sequence
  Description of Artificial Sequence:  Enzymatic Nucleic Acid
gaagcaaaacaauuggc

SEQ ID NO: 3830 - RNA, 17 nt, Artificial Sequence
  Description of Artificial Sequence:  Enzymatic Nucleic Acid
gcaaaacaauuggccgc

SEQ ID NO: 3831 - RNA, 17 nt, Artificial Sequence
  Description of Artificial Sequence:  Enzymatic Nucleic Acid
gccgcuaaacuugcaua

SEQ ID NO: 3832 - RNA, 17 nt, Artificial Sequence
  Description of Artificial Sequence:  Enzymatic Nucleic Acid
aucuucagauauuauca

SEQ ID NO: 3833 - RNA, 17 nt, Artificial Sequence
  Description of Artificial Sequence:  Enzymatic Nucleic Acid
cagaagaaaccucagug

SEQ ID NO: 3834 - RNA, 17 nt, Artificial Sequence
  Description of Artificial Sequence:  Enzymatic Nucleic Acid
ucagugaaaucugacua

SEQ ID NO: 3835 - RNA, 17 nt, Artificial Sequence
  Description of Artificial Sequence:  Enzymatic Nucleic Acid
gaaaucugacuaccugu

SEQ ID NO: 3836 - RNA, 17 nt, Artificial Sequence
  Description of Artificial Sequence:  Enzymatic Nucleic Acid
ccaaagcaacucuuuag

SEQ ID NO: 3837 - RNA, 17 nt, Artificial Sequence
  Description of Artificial Sequence:  Enzymatic Nucleic Acid
cuuuagugaccagcaca

SEQ ID NO: 3838 - RNA, 17 nt, Artificial Sequence
  Description of Artificial Sequence:  Enzymatic Nucleic Acid
gcuucugaaucaucauc

SEQ ID NO: 3839 - RNA, 17 nt, Artificial Sequence
  Description of Artificial Sequence:  Enzymatic Nucleic Acid
ugaaggugacuucucag

SEQ ID NO: 3840 - RNA, 17 nt, Artificial Sequence
  Description of Artificial Sequence:  Enzymatic Nucleic Acid
cucagcagauacaucag

SEQ ID NO: 3841 - RNA, 17 nt, Artificial Sequence
  Description of Artificial Sequence:  Enzymatic Nucleic Acid
caucagagauaaauucu

SEQ ID NO: 3842 - RNA, 17 nt, Artificial Sequence
  Description of Artificial Sequence:  Enzymatic Nucleic Acid
agagauaaauucuaaca

SEQ ID NO: 3843 - RNA, 17 nt, Artificial Sequence
  Description of Artificial Sequence:  Enzymatic Nucleic Acid
aaauucuaacagugaca

SEQ ID NO: 3844 - RNA, 17 nt, Artificial Sequence
  Description of Artificial Sequence:  Enzymatic Nucleic Acid
uaacagugacaguuuaa

SEQ ID NO: 3845 - RNA, 17 nt, Artificial Sequence
  Description of Artificial Sequence:  Enzymatic Nucleic Acid
caguuuaaacaguucuu

SEQ ID NO: 3846 - RNA, 17 nt, Artificial Sequence
  Description of Artificial Sequence:  Enzymatic Nucleic Acid
gcuuaugaauggucuca

SEQ ID NO: 3847 - RNA, 17 nt, Artificial Sequence
  Description of Artificial Sequence:  Enzymatic Nucleic Acid
ucucagaaauaaucaaa

SEQ ID NO: 3848 - RNA, 17 nt, Artificial Sequence
  Description of Artificial Sequence:  Enzymatic Nucleic Acid
cagaaauaaucaaagga

SEQ ID NO: 3849 - RNA, 17 nt, Artificial Sequence
  Description of Artificial Sequence:  Enzymatic Nucleic Acid
gcaaaaagaucuuuggc

SEQ ID NO: 3850 - RNA, 17 nt, Artificial Sequence
  Description of Artificial Sequence:  Enzymatic Nucleic Acid
gcacccagauuugaccu

SEQ ID NO: 3851 - RNA, 17 nt, Artificial Sequence
  Description of Artificial Sequence:  Enzymatic Nucleic Acid
cagauuugaccuuccug

SEQ ID NO: 3852 - RNA, 17 nt, Artificial Sequence
  Description of Artificial Sequence:  Enzymatic Nucleic Acid
ccuuccugacaugaaag

SEQ ID NO: 3853 - RNA, 17 nt, Artificial Sequence
  Description of Artificial Sequence:  Enzymatic Nucleic Acid
ugaaagaaacaaaguau

SEQ ID NO: 3854 - RNA, 17 nt, Artificial Sequence
  Description of Artificial Sequence:  Enzymatic Nucleic Acid
uacuguggacaagaggu

SEQ ID NO: 3855 - RNA, 17 nt, Artificial Sequence
  Description of Artificial Sequence:  Enzymatic Nucleic Acid
uggcauggauuuuaaag

SEQ ID NO: 3856 - RNA, 17 nt, Artificial Sequence
  Description of Artificial Sequence:  Enzymatic Nucleic Acid
uuaaagaaauagaauua

SEQ ID NO: 3857 - RNA, 17 nt, Artificial Sequence
  Description of Artificial Sequence:  Enzymatic Nucleic Acid
gaaauagaauuaauugg

SEQ ID NO: 3858 - RNA, 17 nt, Artificial Sequence
  Description of Artificial Sequence:  Enzymatic Nucleic Acid
uagaauuaauuggcuca

SEQ ID NO: 3859 - RNA, 17 nt, Artificial Sequence
  Description of Artificial Sequence:  Enzymatic Nucleic Acid
ucagguggauuuggcca

SEQ ID NO: 3860 - RNA, 17 nt, Artificial Sequence
  Description of Artificial Sequence:  Enzymatic Nucleic Acid
aaagcaaaacacagaau

SEQ ID NO: 3861 - RNA, 17 nt, Artificial Sequence
  Description of Artificial Sequence:  Enzymatic Nucleic Acid
aacacagaauugacgga

SEQ ID NO: 3862 - RNA, 17 nt, Artificial Sequence
  Description of Artificial Sequence:  Enzymatic Nucleic Acid
cagaauugacggaaaga

SEQ ID NO: 3863 - RNA, 17 nt, Artificial Sequence
  Description of Artificial Sequence:  Enzymatic Nucleic Acid
acggaaagacuuacguu

SEQ ID NO: 3864 - RNA, 17 nt, Artificial Sequence
  Description of Artificial Sequence:  Enzymatic Nucleic Acid
guuauuaaacguguuaa

SEQ ID NO: 3865 - RNA, 17 nt, Artificial Sequence
  Description of Artificial Sequence:  Enzymatic Nucleic Acid
cguguuaaauauaauaa

SEQ ID NO: 3866 - RNA, 17 nt, Artificial Sequence
  Description of Artificial Sequence:  Enzymatic Nucleic Acid
uaaauauaauaacgaga

SEQ ID NO: 3867 - RNA, 17 nt, Artificial Sequence
  Description of Artificial Sequence:  Enzymatic Nucleic Acid
auauaauaacgagaagg

SEQ ID NO: 3868 - RNA, 17 nt, Artificial Sequence
  Description of Artificial Sequence:  Enzymatic Nucleic Acid
uuggcaaaacuugauca

SEQ ID NO: 3869 - RNA, 17 nt, Artificial Sequence
  Description of Artificial Sequence:  Enzymatic Nucleic Acid
aaaacuugaucauguaa

SEQ ID NO: 3870 - RNA, 17 nt, Artificial Sequence
  Description of Artificial Sequence:  Enzymatic Nucleic Acid
ucauguaaauauuguuc

SEQ ID NO: 3871 - RNA, 17 nt, Artificial Sequence
  Description of Artificial Sequence:  Enzymatic Nucleic Acid
ucacuacaauggcuguu

SEQ ID NO: 3872 - RNA, 17 nt, Artificial Sequence
  Description of Artificial Sequence:  Enzymatic Nucleic Acid
cuguugggauggauuug

SEQ ID NO: 3873 - RNA, 17 nt, Artificial Sequence
  Description of Artificial Sequence:  Enzymatic Nucleic Acid
ugggauggauuugauua

SEQ ID NO: 3874 - RNA, 17 nt, Artificial Sequence
  Description of Artificial Sequence:  Enzymatic Nucleic Acid
uggauuugauuaugauc

SEQ ID NO: 3875 - RNA, 17 nt, Artificial Sequence
  Description of Artificial Sequence:  Enzymatic Nucleic Acid
ugauuaugauccugaga

SEQ ID NO: 3876 - RNA, 17 nt, Artificial Sequence
  Description of Artificial Sequence:  Enzymatic Nucleic Acid
auccugagaccagugau

SEQ ID NO: 3877 - RNA, 17 nt, Artificial Sequence
  Description of Artificial Sequence:  Enzymatic Nucleic Acid
gaccagugaugauucuc

SEQ ID NO: 3878 - RNA, 17 nt, Artificial Sequence
  Description of Artificial Sequence:  Enzymatic Nucleic Acid
cagugaugauucucuug

SEQ ID NO: 3879 - RNA, 17 nt, Artificial Sequence
  Description of Artificial Sequence:  Enzymatic Nucleic Acid
gagcagugauuaugauc

SEQ ID NO: 3880 - RNA, 17 nt, Artificial Sequence
  Description of Artificial Sequence:  Enzymatic Nucleic Acid
uccugagaacagcaaaa

SEQ ID NO: 3881 - RNA, 17 nt, Artificial Sequence
  Description of Artificial Sequence:  Enzymatic Nucleic Acid
cagcaaaaauaguucaa

SEQ ID NO: 3882 - RNA, 17 nt, Artificial Sequence
  Description of Artificial Sequence:  Enzymatic Nucleic Acid
ggucaaagacuaagugc

SEQ ID NO: 3883 - RNA, 17 nt, Artificial Sequence
  Description of Artificial Sequence:  Enzymatic Nucleic Acid
ucauccaaauggaauuc

SEQ ID NO: 3884 - RNA, 17 nt, Artificial Sequence
  Description of Artificial Sequence:  Enzymatic Nucleic Acid
caaauggaauucuguga

SEQ ID NO: 3885 - RNA, 17 nt, Artificial Sequence
  Description of Artificial Sequence:  Enzymatic Nucleic Acid
auucugugauaaaggga

SEQ ID NO: 3886 - RNA, 17 nt, Artificial Sequence
  Description of Artificial Sequence:  Enzymatic Nucleic Acid
auaaagggaccuuggaa

SEQ ID NO: 3887 - RNA, 17 nt, Artificial Sequence
  Description of Artificial Sequence:  Enzymatic Nucleic Acid
accuuggaacaauggau

SEQ ID NO: 3888 - RNA, 17 nt, Artificial Sequence
  Description of Artificial Sequence:  Enzymatic Nucleic Acid
uuggaacaauggauuga

SEQ ID NO: 3889 - RNA, 17 nt, Artificial Sequence
  Description of Artificial Sequence:  Enzymatic Nucleic Acid
aacaauggauugaaaaa

SEQ ID NO: 3890 - RNA, 17 nt, Artificial Sequence
  Description of Artificial Sequence:  Enzymatic Nucleic Acid
ggcgagaaacuagacaa

SEQ ID NO: 3891 - RNA, 17 nt, Artificial Sequence
  Description of Artificial Sequence:  Enzymatic Nucleic Acid
gaaacuagacaaaguuu

SEQ ID NO: 3892 - RNA, 17 nt, Artificial Sequence
  Description of Artificial Sequence:  Enzymatic Nucleic Acid
gcuuuggaacucuuuga

SEQ ID NO: 3893 - RNA, 17 nt, Artificial Sequence
  Description of Artificial Sequence:  Enzymatic Nucleic Acid
cucuuugaacaaauaac

SEQ ID NO: 3894 - RNA, 17 nt, Artificial Sequence
  Description of Artificial Sequence:  Enzymatic Nucleic Acid
uugaacaaauaacaaaa

SEQ ID NO: 3895 - RNA, 17 nt, Artificial Sequence
  Description of Artificial Sequence:  Enzymatic Nucleic Acid
aacaaauaacaaaaggg

SEQ ID NO: 3896 - RNA, 17 nt, Artificial Sequence
  Description of Artificial Sequence:  Enzymatic Nucleic Acid
agggguggauuauauac

SEQ ID NO: 3897 - RNA, 17 nt, Artificial Sequence
  Description of Artificial Sequence:  Enzymatic Nucleic Acid
ucaaaaaaauuaauuca

SEQ ID NO: 3898 - RNA, 17 nt, Artificial Sequence
  Description of Artificial Sequence:  Enzymatic Nucleic Acid
aaaaauuaauucauaga

SEQ ID NO: 3899 - RNA, 17 nt, Artificial Sequence
  Description of Artificial Sequence:  Enzymatic Nucleic Acid
ucauagagaucuuaagc

SEQ ID NO: 3900 - RNA, 17 nt, Artificial Sequence
  Description of Artificial Sequence:  Enzymatic Nucleic Acid
gccaaguaauauauucu

SEQ ID NO: 3901 - RNA, 17 nt, Artificial Sequence
  Description of Artificial Sequence:  Enzymatic Nucleic Acid
cuuaguagauacaaaac

SEQ ID NO: 3902 - RNA, 17 nt, Artificial Sequence
  Description of Artificial Sequence:  Enzymatic Nucleic Acid
gauacaaaacaaguaaa

SEQ ID NO: 3903 - RNA, 17 nt, Artificial Sequence
  Description of Artificial Sequence:  Enzymatic Nucleic Acid
aaguaaagauuggagac

SEQ ID NO: 3904 - RNA, 17 nt, Artificial Sequence
  Description of Artificial Sequence:  Enzymatic Nucleic Acid
gauuggagacuuuggac

SEQ ID NO: 3905 - RNA, 17 nt, Artificial Sequence
  Description of Artificial Sequence:  Enzymatic Nucleic Acid
gacuuuggacuuguaac

SEQ ID NO: 3906 - RNA, 17 nt, Artificial Sequence
  Description of Artificial Sequence:  Enzymatic Nucleic Acid
gacuuguaacaucucug

SEQ ID NO: 3907 - RNA, 17 nt, Artificial Sequence
  Description of Artificial Sequence:  Enzymatic Nucleic Acid
ucugaaaaaugauggaa

SEQ ID NO: 3908 - RNA, 17 nt, Artificial Sequence
  Description of Artificial Sequence:  Enzymatic Nucleic Acid
gaaaaaugauggaaagc

SEQ ID NO: 3909 - RNA, 17 nt, Artificial Sequence
  Description of Artificial Sequence:  Enzymatic Nucleic Acid
gaaagcgaacaaggagu

SEQ ID NO: 3910 - RNA, 17 nt, Artificial Sequence
  Description of Artificial Sequence:  Enzymatic Nucleic Acid
guaagggaacuuugcga

SEQ ID NO: 3911 - RNA, 17 nt, Artificial Sequence
  Description of Artificial Sequence:  Enzymatic Nucleic Acid
acuuugcgauacaugag

SEQ ID NO: 3912 - RNA, 17 nt, Artificial Sequence
  Description of Artificial Sequence:  Enzymatic Nucleic Acid
agcccagaacagauuuc

SEQ ID NO: 3913 - RNA, 17 nt, Artificial Sequence
  Description of Artificial Sequence:  Enzymatic Nucleic Acid
cagaacagauuucuucg

SEQ ID NO: 3914 - RNA, 17 nt, Artificial Sequence
  Description of Artificial Sequence:  Enzymatic Nucleic Acid
uucgcaagacuauggaa

SEQ ID NO: 3915 - RNA, 17 nt, Artificial Sequence
  Description of Artificial Sequence:  Enzymatic Nucleic Acid
ggaaguggaccucuacg

SEQ ID NO: 3916 - RNA, 17 nt, Artificial Sequence
  Description of Artificial Sequence:  Enzymatic Nucleic Acid
uggggcuaauucuugcu

SEQ ID NO: 3917 - RNA, 17 nt, Artificial Sequence
  Description of Artificial Sequence:  Enzymatic Nucleic Acid
cuugcugaacuucuuca

SEQ ID NO: 3918 - RNA, 17 nt, Artificial Sequence
  Description of Artificial Sequence:  Enzymatic Nucleic Acid
uguaugugacacugcuu

SEQ ID NO: 3919 - RNA, 17 nt, Artificial Sequence
  Description of Artificial Sequence:  Enzymatic Nucleic Acid
cuuuugaaacaucaaag

SEQ ID NO: 3920 - RNA, 17 nt, Artificial Sequence
  Description of Artificial Sequence:  Enzymatic Nucleic Acid
uuucacagaccuacggg

SEQ ID NO: 3921 - RNA, 17 nt, Artificial Sequence
  Description of Artificial Sequence:  Enzymatic Nucleic Acid
ccuacgggauggcauca

SEQ ID NO: 3922 - RNA, 17 nt, Artificial Sequence
  Description of Artificial Sequence:  Enzymatic Nucleic Acid
caucucagauauauuug

SEQ ID NO: 3923 - RNA, 17 nt, Artificial Sequence
  Description of Artificial Sequence:  Enzymatic Nucleic Acid
uauauuugauaaaaaag

SEQ ID NO: 3924 - RNA, 17 nt, Artificial Sequence
  Description of Artificial Sequence:  Enzymatic Nucleic Acid
aagaaaaaacucuucua

SEQ ID NO: 3925 - RNA, 17 nt, Artificial Sequence
  Description of Artificial Sequence:  Enzymatic Nucleic Acid
cuacagaaauuacucuc

SEQ ID NO: 3926 - RNA, 17 nt, Artificial Sequence
  Description of Artificial Sequence:  Enzymatic Nucleic Acid
ucaaagaaaccugagga

SEQ ID NO: 3927 - RNA, 17 nt, Artificial Sequence
  Description of Artificial Sequence:  Enzymatic Nucleic Acid
accugaggaucgaccua

SEQ ID NO: 3928 - RNA, 17 nt, Artificial Sequence
  Description of Artificial Sequence:  Enzymatic Nucleic Acid
gaggaucgaccuaacac

SEQ ID NO: 3929 - RNA, 17 nt, Artificial Sequence
  Description of Artificial Sequence:  Enzymatic Nucleic Acid
ucgaccuaacacaucug

SEQ ID NO: 3930 - RNA, 17 nt, Artificial Sequence
  Description of Artificial Sequence:  Enzymatic Nucleic Acid
caucugaaauacuaagg

SEQ ID NO: 3931 - RNA, 17 nt, Artificial Sequence
  Description of Artificial Sequence:  Enzymatic Nucleic Acid
uacuaaggaccuugacu

SEQ ID NO: 3932 - RNA, 17 nt, Artificial Sequence
  Description of Artificial Sequence:  Enzymatic Nucleic Acid
ggaccuugacugugugg

SEQ ID NO: 3933 - RNA, 17 nt, Artificial Sequence
  Description of Artificial Sequence:  Enzymatic Nucleic Acid
agagaaaaaugaacgac

SEQ ID NO: 3934 - RNA, 17 nt, Artificial Sequence
  Description of Artificial Sequence:  Enzymatic Nucleic Acid
aaaaaugaacgacacac

SEQ ID NO: 3935 - RNA, 17 nt, Artificial Sequence
  Description of Artificial Sequence:  Enzymatic Nucleic Acid
aaugaacgacacacaug

SEQ ID NO: 3936 - RNA, 17 nt, Artificial Sequence
  Description of Artificial Sequence:  Enzymatic Nucleic Acid
ugcuucugauaugcagu

SEQ ID NO: 3937 - RNA, 17 nt, Artificial Sequence
  Description of Artificial Sequence:  Enzymatic Nucleic Acid
uuccuuaaauuaucuaa

SEQ ID NO: 3938 - RNA, 17 nt, Artificial Sequence
  Description of Artificial Sequence:  Enzymatic Nucleic Acid
uaucuaaaaucugcuag

SEQ ID NO: 3939 - RNA, 17 nt, Artificial Sequence
  Description of Artificial Sequence:  Enzymatic Nucleic Acid
gcuagggaauaucaaua

SEQ ID NO: 3940 - RNA, 17 nt, Artificial Sequence
  Description of Artificial Sequence:  Enzymatic Nucleic Acid
gaauaucaauagauauu

SEQ ID NO: 3941 - RNA, 17 nt, Artificial Sequence
  Description of Artificial Sequence:  Enzymatic Nucleic Acid
aucaauagauauuuacc

SEQ ID NO: 3942 - RNA, 17 nt, Artificial Sequence
  Description of Artificial Sequence:  Enzymatic Nucleic Acid
uuauuuuaauguuuccu

SEQ ID NO: 3943 - RNA, 17 nt, Artificial Sequence
  Description of Artificial Sequence:  Enzymatic Nucleic Acid
uuccuuuaauuuuuuac

SEQ ID NO: 3944 - RNA, 17 nt, Artificial Sequence
  Description of Artificial Sequence:  Enzymatic Nucleic Acid
uuuuacuaaucuuucug

SEQ ID NO: 3945 - RNA, 17 nt, Artificial Sequence
  Description of Artificial Sequence:  Enzymatic Nucleic Acid
cugcagaaacagaaagg

SEQ ID NO: 3946 - RNA, 17 nt, Artificial Sequence
  Description of Artificial Sequence:  Enzymatic Nucleic Acid
cuucaaaaacauucuua

SEQ ID NO: 3947 - RNA, 17 nt, Artificial Sequence
  Description of Artificial Sequence:  Enzymatic Nucleic Acid
uuuuaaagacagagucu

SEQ ID NO: 3948 - RNA, 17 nt, Artificial Sequence
  Description of Artificial Sequence:  Enzymatic Nucleic Acid
ggagugcaaugacacag

SEQ ID NO: 3949 - RNA, 17 nt, Artificial Sequence
  Description of Artificial Sequence:  Enzymatic Nucleic Acid
gugcaaugacacagucu

SEQ ID NO: 3950 - RNA, 17 nt, Artificial Sequence
  Description of Artificial Sequence:  Enzymatic Nucleic Acid
ucacugcaacuucugcc

SEQ ID NO: 3951 - RNA, 17 nt, Artificial Sequence
  Description of Artificial Sequence:  Enzymatic Nucleic Acid
uucaagugauucuccug

SEQ ID NO: 3952 - RNA, 17 nt, Artificial Sequence
  Description of Artificial Sequence:  Enzymatic Nucleic Acid
guagcuggauuacaggc

SEQ ID NO: 3953 - RNA, 17 nt, Artificial Sequence
  Description of Artificial Sequence:  Enzymatic Nucleic Acid
cccacccaacuaauuuu

SEQ ID NO: 3954 - RNA, 17 nt, Artificial Sequence
  Description of Artificial Sequence:  Enzymatic Nucleic Acid
cccaacuaauuuuugug

SEQ ID NO: 3955 - RNA, 17 nt, Artificial Sequence
  Description of Artificial Sequence:  Enzymatic Nucleic Acid
uguuuuuaauaaagaca

SEQ ID NO: 3956 - RNA, 17 nt, Artificial Sequence
  Description of Artificial Sequence:  Enzymatic Nucleic Acid
uaauaaagacaggguuu

SEQ ID NO: 3957 - RNA, 17 nt, Artificial Sequence
  Description of Artificial Sequence:  Enzymatic Nucleic Acid
ggucucaaacuccugac

SEQ ID NO: 3958 - RNA, 17 nt, Artificial Sequence
  Description of Artificial Sequence:  Enzymatic Nucleic Acid
aacuccugaccucaagu

SEQ ID NO: 3959 - RNA, 17 nt, Artificial Sequence
  Description of Artificial Sequence:  Enzymatic Nucleic Acid
cucaaguaauccaccug

SEQ ID NO: 3960 - RNA, 17 nt, Artificial Sequence
  Description of Artificial Sequence:  Enzymatic Nucleic Acid
gugcugggauuacaggg

SEQ ID NO: 3961 - RNA, 17 nt, Artificial Sequence
  Description of Artificial Sequence:  Enzymatic Nucleic Acid
uuacagggaugagccac

SEQ ID NO: 3962 - RNA, 17 nt, Artificial Sequence
  Description of Artificial Sequence:  Enzymatic Nucleic Acid
uucuaaagauggaaaaa

SEQ ID NO: 3963 - RNA, 17 nt, Artificial Sequence
  Description of Artificial Sequence:  Enzymatic Nucleic Acid
auggaaaaaccaccccc

SEQ ID NO: 3964 - RNA, 17 nt, Artificial Sequence
  Description of Artificial Sequence:  Enzymatic Nucleic Acid
acccccaaauuuucuuu

SEQ ID NO: 3965 - RNA, 17 nt, Artificial Sequence
  Description of Artificial Sequence:  Enzymatic Nucleic Acid
uacuauuaaugaaucaa

SEQ ID NO: 3966 - RNA, 17 nt, Artificial Sequence
  Description of Artificial Sequence:  Enzymatic Nucleic Acid
auuaaugaaucaaucaa

SEQ ID NO: 3967 - RNA, 17 nt, Artificial Sequence
  Description of Artificial Sequence:  Enzymatic Nucleic Acid
augaaucaaucaauuca

SEQ ID NO: 3968 - RNA, 17 nt, Artificial Sequence
  Description of Artificial Sequence:  Enzymatic Nucleic Acid
aucaaucaauucauauc

SEQ ID NO: 3969 - RNA, 17 nt, Artificial Sequence
  Description of Artificial Sequence:  Enzymatic Nucleic Acid
uuuauuaaauuucuacc

SEQ ID NO: 3970 - RNA, 17 nt, Artificial Sequence
  Description of Artificial Sequence:  Enzymatic Nucleic Acid
ccaaaaaaauguaagau

SEQ ID NO: 3971 - RNA, 17 nt, Artificial Sequence
  Description of Artificial Sequence:  Enzymatic Nucleic Acid
aauguaagaucguucuc

SEQ ID NO: 3972 - RNA, 17 nt, Artificial Sequence
  Description of Artificial Sequence:  Enzymatic Nucleic Acid
cuggagaaauaugguac

SEQ ID NO: 3973 - RNA, 17 nt, Artificial Sequence
  Description of Artificial Sequence:  Enzymatic Nucleic Acid
aaaaagugauguacaac

SEQ ID NO: 3974 - RNA, 17 nt, Artificial Sequence
  Description of Artificial Sequence:  Enzymatic Nucleic Acid
gcggcggcggcggcgca

SEQ ID NO: 3975 - RNA, 17 nt, Artificial Sequence
  Description of Artificial Sequence:  Enzymatic Nucleic Acid
gcggcggcggcgcaguu

SEQ ID NO: 3976 - RNA, 17 nt, Artificial Sequence
  Description of Artificial Sequence:  Enzymatic Nucleic Acid
uacuuugugacuugcgg

SEQ ID NO: 3977 - RNA, 17 nt, Artificial Sequence
  Description of Artificial Sequence:  Enzymatic Nucleic Acid
ugacuugcggucacagu

SEQ ID NO: 3978 - RNA, 17 nt, Artificial Sequence
  Description of Artificial Sequence:  Enzymatic Nucleic Acid
gucacaguggcauucag

SEQ ID NO: 3979 - RNA, 17 nt, Artificial Sequence
  Description of Artificial Sequence:  Enzymatic Nucleic Acid
ccacacuugguagaacc

SEQ ID NO: 3980 - RNA, 17 nt, Artificial Sequence
  Description of Artificial Sequence:  Enzymatic Nucleic Acid
acuugguagaaccacag

SEQ ID NO: 3981 - RNA, 17 nt, Artificial Sequence
  Description of Artificial Sequence:  Enzymatic Nucleic Acid
gaaccacaggcacgaca

SEQ ID NO: 3982 - RNA, 17 nt, Artificial Sequence
  Description of Artificial Sequence:  Enzymatic Nucleic Acid
acaggcacgacaagcau

SEQ ID NO: 3983 - RNA, 17 nt, Artificial Sequence
  Description of Artificial Sequence:  Enzymatic Nucleic Acid
caagcauagaaacaucc

SEQ ID NO: 3984 - RNA, 17 nt, Artificial Sequence
  Description of Artificial Sequence:  Enzymatic Nucleic Acid
ucuucaucgaggcaucg

SEQ ID NO: 3985 - RNA, 17 nt, Artificial Sequence
  Description of Artificial Sequence:  Enzymatic Nucleic Acid
uucaucgaggcaucgag

SEQ ID NO: 3986 - RNA, 17 nt, Artificial Sequence
  Description of Artificial Sequence:  Enzymatic Nucleic Acid
gaggcaucgagguccau

SEQ ID NO: 3987 - RNA, 17 nt, Artificial Sequence
  Description of Artificial Sequence:  Enzymatic Nucleic Acid
ggcaucgagguccaucc

SEQ ID NO: 3988 - RNA, 17 nt, Artificial Sequence
  Description of Artificial Sequence:  Enzymatic Nucleic Acid
aaaaaucaggagacccu

SEQ ID NO: 3989 - RNA, 17 nt, Artificial Sequence
  Description of Artificial Sequence:  Enzymatic Nucleic Acid
aaaaucaggagacccug

SEQ ID NO: 3990 - RNA, 17 nt, Artificial Sequence
  Description of Artificial Sequence:  Enzymatic Nucleic Acid
aaucaggagacccuggc

SEQ ID NO: 3991 - RNA, 17 nt, Artificial Sequence
  Description of Artificial Sequence:  Enzymatic Nucleic Acid
gagacccuggcuaucau

SEQ ID NO: 3992 - RNA, 17 nt, Artificial Sequence
  Description of Artificial Sequence:  Enzymatic Nucleic Acid
cuaucauagaccuuagu

SEQ ID NO: 3993 - RNA, 17 nt, Artificial Sequence
  Description of Artificial Sequence:  Enzymatic Nucleic Acid
ucuucgcugguauacuc

SEQ ID NO: 3994 - RNA, 17 nt, Artificial Sequence
  Description of Artificial Sequence:  Enzymatic Nucleic Acid
caaccagcgguugacuu

SEQ ID NO: 3995 - RNA, 17 nt, Artificial Sequence
  Description of Artificial Sequence:  Enzymatic Nucleic Acid
cagcgguugacuuuuuu

SEQ ID NO: 3996 - RNA, 17 nt, Artificial Sequence
  Description of Artificial Sequence:  Enzymatic Nucleic Acid
caguuucuggagcaaau

SEQ ID NO: 3997 - RNA, 17 nt, Artificial Sequence
  Description of Artificial Sequence:  Enzymatic Nucleic Acid
aguuucuggagcaaauu

SEQ ID NO: 3998 - RNA, 17 nt, Artificial Sequence
  Description of Artificial Sequence:  Enzymatic Nucleic Acid
gccuuccuggauuugua

SEQ ID NO: 3999 - RNA, 17 nt, Artificial Sequence
  Description of Artificial Sequence:  Enzymatic Nucleic Acid
ccuuccuggauuuguaa

SEQ ID NO: 4000 - RNA, 17 nt, Artificial Sequence
  Description of Artificial Sequence:  Enzymatic Nucleic Acid
auuguaaugaccucaaa

SEQ ID NO: 4001 - RNA, 17 nt, Artificial Sequence
  Description of Artificial Sequence:  Enzymatic Nucleic Acid
uuccaucugacucaggu

SEQ ID NO: 4002 - RNA, 17 nt, Artificial Sequence
  Description of Artificial Sequence:  Enzymatic Nucleic Acid
cugacucagguuugcuu

SEQ ID NO: 4003 - RNA, 17 nt, Artificial Sequence
  Description of Artificial Sequence:  Enzymatic Nucleic Acid
gcuucucuggcggucuu

SEQ ID NO: 4004 - RNA, 17 nt, Artificial Sequence
  Description of Artificial Sequence:  Enzymatic Nucleic Acid
ucucuggcggucuucag

SEQ ID NO: 4005 - RNA, 17 nt, Artificial Sequence
  Description of Artificial Sequence:  Enzymatic Nucleic Acid
ggucuucagaaucaaca

SEQ ID NO: 4006 - RNA, 17 nt, Artificial Sequence
  Description of Artificial Sequence:  Enzymatic Nucleic Acid
acuuccgugauuaucug

SEQ ID NO: 4007 - RNA, 17 nt, Artificial Sequence
  Description of Artificial Sequence:  Enzymatic Nucleic Acid
ugcauuuuggacaaagc

SEQ ID NO: 4008 - RNA, 17 nt, Artificial Sequence
  Description of Artificial Sequence:  Enzymatic Nucleic Acid
gcauuuuggacaaagcu

SEQ ID NO: 4009 - RNA, 17 nt, Artificial Sequence
  Description of Artificial Sequence:  Enzymatic Nucleic Acid
uccaaccaggauacggg

SEQ ID NO: 4010 - RNA, 17 nt, Artificial Sequence
  Description of Artificial Sequence:  Enzymatic Nucleic Acid
ccaaccaggauacggga

SEQ ID NO: 4011 - RNA, 17 nt, Artificial Sequence
  Description of Artificial Sequence:  Enzymatic Nucleic Acid
caggauacgggaagaag

SEQ ID NO: 4012 - RNA, 17 nt, Artificial Sequence
  Description of Artificial Sequence:  Enzymatic Nucleic Acid
aggauacgggaagaaga

SEQ ID NO: 4013 - RNA, 17 nt, Artificial Sequence
  Description of Artificial Sequence:  Enzymatic Nucleic Acid
ggauacgggaagaagaa

SEQ ID NO: 4014 - RNA, 17 nt, Artificial Sequence
  Description of Artificial Sequence:  Enzymatic Nucleic Acid
uacgggaagaagaaaug

SEQ ID NO: 4015 - RNA, 17 nt, Artificial Sequence
  Description of Artificial Sequence:  Enzymatic Nucleic Acid
gggaagaagaaauggcu

SEQ ID NO: 4016 - RNA, 17 nt, Artificial Sequence
  Description of Artificial Sequence:  Enzymatic Nucleic Acid
gaagaaauggcugguga

SEQ ID NO: 4017 - RNA, 17 nt, Artificial Sequence
  Description of Artificial Sequence:  Enzymatic Nucleic Acid
aaauggcuggugaucuu

SEQ ID NO: 4018 - RNA, 17 nt, Artificial Sequence
  Description of Artificial Sequence:  Enzymatic Nucleic Acid
uggcuggugaucuuuca

SEQ ID NO: 4019 - RNA, 17 nt, Artificial Sequence
  Description of Artificial Sequence:  Enzymatic Nucleic Acid
uuucagcagguuucuuc

SEQ ID NO: 4020 - RNA, 17 nt, Artificial Sequence
  Description of Artificial Sequence:  Enzymatic Nucleic Acid
uucuucauggaggaacu

SEQ ID NO: 4021 - RNA, 17 nt, Artificial Sequence
  Description of Artificial Sequence:  Enzymatic Nucleic Acid
ucuucauggaggaacuu

SEQ ID NO: 4022 - RNA, 17 nt, Artificial Sequence
  Description of Artificial Sequence:  Enzymatic Nucleic Acid
uucauggaggaacuuaa

SEQ ID NO: 4023 - RNA, 17 nt, Artificial Sequence
  Description of Artificial Sequence:  Enzymatic Nucleic Acid
ucauggaggaacuuaau

SEQ ID NO: 4024 - RNA, 17 nt, Artificial Sequence
  Description of Artificial Sequence:  Enzymatic Nucleic Acid
uaccgucagaagcaggg

SEQ ID NO: 4025 - RNA, 17 nt, Artificial Sequence
  Description of Artificial Sequence:  Enzymatic Nucleic Acid
cagaagcagggaguagu

SEQ ID NO: 4026 - RNA, 17 nt, Artificial Sequence
  Description of Artificial Sequence:  Enzymatic Nucleic Acid
agaagcagggaguagua

SEQ ID NO: 4027 - RNA, 17 nt, Artificial Sequence
  Description of Artificial Sequence:  Enzymatic Nucleic Acid
gaagcagggaguaguac

SEQ ID NO: 4028 - RNA, 17 nt, Artificial Sequence
  Description of Artificial Sequence:  Enzymatic Nucleic Acid
aauaucaagaacugccu

SEQ ID NO: 4029 - RNA, 17 nt, Artificial Sequence
  Description of Artificial Sequence:  Enzymatic Nucleic Acid
cuaauucaggaccucca

SEQ ID NO: 4030 - RNA, 17 nt, Artificial Sequence
  Description of Artificial Sequence:  Enzymatic Nucleic Acid
uaauucaggaccuccac

SEQ ID NO: 4031 - RNA, 17 nt, Artificial Sequence
  Description of Artificial Sequence:  Enzymatic Nucleic Acid
cuccacaugauaggagg

SEQ ID NO: 4032 - RNA, 17 nt, Artificial Sequence
  Description of Artificial Sequence:  Enzymatic Nucleic Acid
acaugauaggagguuua

SEQ ID NO: 4033 - RNA, 17 nt, Artificial Sequence
  Description of Artificial Sequence:  Enzymatic Nucleic Acid
caugauaggagguuuac

SEQ ID NO: 4034 - RNA, 17 nt, Artificial Sequence
  Description of Artificial Sequence:  Enzymatic Nucleic Acid
ugauaggagguuuacau

SEQ ID NO: 4035 - RNA, 17 nt, Artificial Sequence
  Description of Artificial Sequence:  Enzymatic Nucleic Acid
uuauaauagauggaaga

SEQ ID NO: 4036 - RNA, 17 nt, Artificial Sequence
  Description of Artificial Sequence:  Enzymatic Nucleic Acid
uaauagauggaagagaa

SEQ ID NO: 4037 - RNA, 17 nt, Artificial Sequence
  Description of Artificial Sequence:  Enzymatic Nucleic Acid
aauagauggaagagaau

SEQ ID NO: 4038 - RNA, 17 nt, Artificial Sequence
  Description of Artificial Sequence:  Enzymatic Nucleic Acid
agauggaagagaauuuc

SEQ ID NO: 4039 - RNA, 17 nt, Artificial Sequence
  Description of Artificial Sequence:  Enzymatic Nucleic Acid
auggaagagaauuucca

SEQ ID NO: 4040 - RNA, 17 nt, Artificial Sequence
  Description of Artificial Sequence:  Enzymatic Nucleic Acid
aauuuccagaaggugaa

SEQ ID NO: 4041 - RNA, 17 nt, Artificial Sequence
  Description of Artificial Sequence:  Enzymatic Nucleic Acid
uuccagaaggugaaggu

SEQ ID NO: 4042 - RNA, 17 nt, Artificial Sequence
  Description of Artificial Sequence:  Enzymatic Nucleic Acid
cagaaggugaagguaga

SEQ ID NO: 4043 - RNA, 17 nt, Artificial Sequence
  Description of Artificial Sequence:  Enzymatic Nucleic Acid
aaggugaagguagauca

SEQ ID NO: 4044 - RNA, 17 nt, Artificial Sequence
  Description of Artificial Sequence:  Enzymatic Nucleic Acid
ugaagguagaucaaaga

SEQ ID NO: 4045 - RNA, 17 nt, Artificial Sequence
  Description of Artificial Sequence:  Enzymatic Nucleic Acid
agaucaaagaaggaagc

SEQ ID NO: 4046 - RNA, 17 nt, Artificial Sequence
  Description of Artificial Sequence:  Enzymatic Nucleic Acid
ucaaagaaggaagcaaa

SEQ ID NO: 4047 - RNA, 17 nt, Artificial Sequence
  Description of Artificial Sequence:  Enzymatic Nucleic Acid
caaagaaggaagcaaaa

SEQ ID NO: 4048 - RNA, 17 nt, Artificial Sequence
  Description of Artificial Sequence:  Enzymatic Nucleic Acid
uagcuguugagauacuu

SEQ ID NO: 4049 - RNA, 17 nt, Artificial Sequence
  Description of Artificial Sequence:  Enzymatic Nucleic Acid
gcuguugagauacuuaa

SEQ ID NO: 4050 - RNA, 17 nt, Artificial Sequence
  Description of Artificial Sequence:  Enzymatic Nucleic Acid
cuuaauaaggaaaagaa

SEQ ID NO: 4051 - RNA, 17 nt, Artificial Sequence
  Description of Artificial Sequence:  Enzymatic Nucleic Acid
uuaauaaggaaaagaag

SEQ ID NO: 4052 - RNA, 17 nt, Artificial Sequence
  Description of Artificial Sequence:  Enzymatic Nucleic Acid
aaggaaaagaaggcagu

SEQ ID NO: 4053 - RNA, 17 nt, Artificial Sequence
  Description of Artificial Sequence:  Enzymatic Nucleic Acid
gaaaagaaggcaguuag

SEQ ID NO: 4054 - RNA, 17 nt, Artificial Sequence
  Description of Artificial Sequence:  Enzymatic Nucleic Acid
uuauuauugacaacaac

SEQ ID NO: 4055 - RNA, 17 nt, Artificial Sequence
  Description of Artificial Sequence:  Enzymatic Nucleic Acid
acaacaacgaauucuuc

SEQ ID NO: 4056 - RNA, 17 nt, Artificial Sequence
  Description of Artificial Sequence:  Enzymatic Nucleic Acid
auucuucagaaggauua

SEQ ID NO: 4057 - RNA, 17 nt, Artificial Sequence
  Description of Artificial Sequence:  Enzymatic Nucleic Acid
cuucagaaggauuaucc

SEQ ID NO: 4058 - RNA, 17 nt, Artificial Sequence
  Description of Artificial Sequence:  Enzymatic Nucleic Acid
uucagaaggauuaucca

SEQ ID NO: 4059 - RNA, 17 nt, Artificial Sequence
  Description of Artificial Sequence:  Enzymatic Nucleic Acid
uuauccauggggaauua

SEQ ID NO: 4060 - RNA, 17 nt, Artificial Sequence
  Description of Artificial Sequence:  Enzymatic Nucleic Acid
uauccauggggaauuac

SEQ ID NO: 4061 - RNA, 17 nt, Artificial Sequence
  Description of Artificial Sequence:  Enzymatic Nucleic Acid
auccauggggaauuaca

SEQ ID NO: 4062 - RNA, 17 nt, Artificial Sequence
  Description of Artificial Sequence:  Enzymatic Nucleic Acid
uccauggggaauuacau

SEQ ID NO: 4063 - RNA, 17 nt, Artificial Sequence
  Description of Artificial Sequence:  Enzymatic Nucleic Acid
auuacauaggccuuauc

SEQ ID NO: 4064 - RNA, 17 nt, Artificial Sequence
  Description of Artificial Sequence:  Enzymatic Nucleic Acid
uaucaauagaauugccc

SEQ ID NO: 4065 - RNA, 17 nt, Artificial Sequence
  Description of Artificial Sequence:  Enzymatic Nucleic Acid
auugcccagaagaaaag

SEQ ID NO: 4066 - RNA, 17 nt, Artificial Sequence
  Description of Artificial Sequence:  Enzymatic Nucleic Acid
gcccagaagaaaagacu

SEQ ID NO: 4067 - RNA, 17 nt, Artificial Sequence
  Description of Artificial Sequence:  Enzymatic Nucleic Acid
gaagaaaagacuaacug

SEQ ID NO: 4068 - RNA, 17 nt, Artificial Sequence
  Description of Artificial Sequence:  Enzymatic Nucleic Acid
uaaauuaugaacagugu

SEQ ID NO: 4069 - RNA, 17 nt, Artificial Sequence
  Description of Artificial Sequence:  Enzymatic Nucleic Acid
ugugcaucgggggugca

SEQ ID NO: 4070 - RNA, 17 nt, Artificial Sequence
  Description of Artificial Sequence:  Enzymatic Nucleic Acid
gugcaucgggggugcau

SEQ ID NO: 4071 - RNA, 17 nt, Artificial Sequence
  Description of Artificial Sequence:  Enzymatic Nucleic Acid
ugcaucgggggugcaug

SEQ ID NO: 4072 - RNA, 17 nt, Artificial Sequence
  Description of Artificial Sequence:  Enzymatic Nucleic Acid
gcaucgggggugcaugg

SEQ ID NO: 4073 - RNA, 17 nt, Artificial Sequence
  Description of Artificial Sequence:  Enzymatic Nucleic Acid
gggugcaugggccagaa

SEQ ID NO: 4074 - RNA, 17 nt, Artificial Sequence
  Description of Artificial Sequence:  Enzymatic Nucleic Acid
ggugcaugggccagaag

SEQ ID NO: 4075 - RNA, 17 nt, Artificial Sequence
  Description of Artificial Sequence:  Enzymatic Nucleic Acid
augggccagaaggauuu

SEQ ID NO: 4076 - RNA, 17 nt, Artificial Sequence
  Description of Artificial Sequence:  Enzymatic Nucleic Acid
ggccagaaggauuucau

SEQ ID NO: 4077 - RNA, 17 nt, Artificial Sequence
  Description of Artificial Sequence:  Enzymatic Nucleic Acid
gccagaaggauuucauu

SEQ ID NO: 4078 - RNA, 17 nt, Artificial Sequence
  Description of Artificial Sequence:  Enzymatic Nucleic Acid
ugcaaaaugggacagaa

SEQ ID NO: 4079 - RNA, 17 nt, Artificial Sequence
  Description of Artificial Sequence:  Enzymatic Nucleic Acid
gcaaaaugggacagaaa

SEQ ID NO: 4080 - RNA, 17 nt, Artificial Sequence
  Description of Artificial Sequence:  Enzymatic Nucleic Acid
caaaaugggacagaaag

SEQ ID NO: 4081 - RNA, 17 nt, Artificial Sequence
  Description of Artificial Sequence:  Enzymatic Nucleic Acid
augggacagaaagaaua

SEQ ID NO: 4082 - RNA, 17 nt, Artificial Sequence
  Description of Artificial Sequence:  Enzymatic Nucleic Acid
gacagaaagaauauagu

SEQ ID NO: 4083 - RNA, 17 nt, Artificial Sequence
  Description of Artificial Sequence:  Enzymatic Nucleic Acid
auaguauugguacaggu

SEQ ID NO: 4084 - RNA, 17 nt, Artificial Sequence
  Description of Artificial Sequence:  Enzymatic Nucleic Acid
uugguacagguucuacu

SEQ ID NO: 4085 - RNA, 17 nt, Artificial Sequence
  Description of Artificial Sequence:  Enzymatic Nucleic Acid
acuaaacaggaagcaaa

SEQ ID NO: 4086 - RNA, 17 nt, Artificial Sequence
  Description of Artificial Sequence:  Enzymatic Nucleic Acid
cuaaacaggaagcaaaa

SEQ ID NO: 4087 - RNA, 17 nt, Artificial Sequence
  Description of Artificial Sequence:  Enzymatic Nucleic Acid
aaacaauuggccgcuaa

SEQ ID NO: 4088 - RNA, 17 nt, Artificial Sequence
  Description of Artificial Sequence:  Enzymatic Nucleic Acid
uaucuucagauauuauc

SEQ ID NO: 4089 - RNA, 17 nt, Artificial Sequence
  Description of Artificial Sequence:  Enzymatic Nucleic Acid
uauuaucagaagaaacc

SEQ ID NO: 4090 - RNA, 17 nt, Artificial Sequence
  Description of Artificial Sequence:  Enzymatic Nucleic Acid
uaucagaagaaaccuca

SEQ ID NO: 4091 - RNA, 17 nt, Artificial Sequence
  Description of Artificial Sequence:  Enzymatic Nucleic Acid
accucagugaaaucuga

SEQ ID NO: 4092 - RNA, 17 nt, Artificial Sequence
  Description of Artificial Sequence:  Enzymatic Nucleic Acid
ugaaaucugacuaccug

SEQ ID NO: 4093 - RNA, 17 nt, Artificial Sequence
  Description of Artificial Sequence:  Enzymatic Nucleic Acid
uguccucugguucuuuu

SEQ ID NO: 4094 - RNA, 17 nt, Artificial Sequence
  Description of Artificial Sequence:  Enzymatic Nucleic Acid
cuacgugugagucccaa

SEQ ID NO: 4095 - RNA, 17 nt, Artificial Sequence
  Description of Artificial Sequence:  Enzymatic Nucleic Acid
ucuuuagugaccagcac

SEQ ID NO: 4096 - RNA, 17 nt, Artificial Sequence
  Description of Artificial Sequence:  Enzymatic Nucleic Acid
ucgcuucugaaucauca

SEQ ID NO: 4097 - RNA, 17 nt, Artificial Sequence
  Description of Artificial Sequence:  Enzymatic Nucleic Acid
caucaucugaaggugac

SEQ ID NO: 4098 - RNA, 17 nt, Artificial Sequence
  Description of Artificial Sequence:  Enzymatic Nucleic Acid
caucugaaggugacuuc

SEQ ID NO: 4099 - RNA, 17 nt, Artificial Sequence
  Description of Artificial Sequence:  Enzymatic Nucleic Acid
cugaaggugacuucuca

SEQ ID NO: 4100 - RNA, 17 nt, Artificial Sequence
  Description of Artificial Sequence:  Enzymatic Nucleic Acid
ucucagcagauacauca

SEQ ID NO: 4101 - RNA, 17 nt, Artificial Sequence
  Description of Artificial Sequence:  Enzymatic Nucleic Acid
auacaucagagauaaau

SEQ ID NO: 4102 - RNA, 17 nt, Artificial Sequence
  Description of Artificial Sequence:  Enzymatic Nucleic Acid
acaucagagauaaauuc

SEQ ID NO: 4103 - RNA, 17 nt, Artificial Sequence
  Description of Artificial Sequence:  Enzymatic Nucleic Acid
cuaacagugacaguuua

SEQ ID NO: 4104 - RNA, 17 nt, Artificial Sequence
  Description of Artificial Sequence:  Enzymatic Nucleic Acid
uugcuuaugaauggucu

SEQ ID NO: 4105 - RNA, 17 nt, Artificial Sequence
  Description of Artificial Sequence:  Enzymatic Nucleic Acid
uuaugaauggucucaga

SEQ ID NO: 4106 - RNA, 17 nt, Artificial Sequence
  Description of Artificial Sequence:  Enzymatic Nucleic Acid
uggucucagaaauaauc

SEQ ID NO: 4107 - RNA, 17 nt, Artificial Sequence
  Description of Artificial Sequence:  Enzymatic Nucleic Acid
uaaucaaaggaaggcaa

SEQ ID NO: 4108 - RNA, 17 nt, Artificial Sequence
  Description of Artificial Sequence:  Enzymatic Nucleic Acid
aaucaaaggaaggcaaa

SEQ ID NO: 4109 - RNA, 17 nt, Artificial Sequence
  Description of Artificial Sequence:  Enzymatic Nucleic Acid
caaaggaaggcaaaaag

SEQ ID NO: 4110 - RNA, 17 nt, Artificial Sequence
  Description of Artificial Sequence:  Enzymatic Nucleic Acid
ggcaaaaagaucuuugg

SEQ ID NO: 4111 - RNA, 17 nt, Artificial Sequence
  Description of Artificial Sequence:  Enzymatic Nucleic Acid
agaucuuuggcacccag

SEQ ID NO: 4112 - RNA, 17 nt, Artificial Sequence
  Description of Artificial Sequence:  Enzymatic Nucleic Acid
ggcacccagauuugacc

SEQ ID NO: 4113 - RNA, 17 nt, Artificial Sequence
  Description of Artificial Sequence:  Enzymatic Nucleic Acid
ccagauuugaccuuccu

SEQ ID NO: 4114 - RNA, 17 nt, Artificial Sequence
  Description of Artificial Sequence:  Enzymatic Nucleic Acid
accuuccugacaugaaa

SEQ ID NO: 4115 - RNA, 17 nt, Artificial Sequence
  Description of Artificial Sequence:  Enzymatic Nucleic Acid
ccugacaugaaagaaac

SEQ ID NO: 4116 - RNA, 17 nt, Artificial Sequence
  Description of Artificial Sequence:  Enzymatic Nucleic Acid
acaugaaagaaacaaag

SEQ ID NO: 4117 - RNA, 17 nt, Artificial Sequence
  Description of Artificial Sequence:  Enzymatic Nucleic Acid
uauacuguggacaagag

SEQ ID NO: 4118 - RNA, 17 nt, Artificial Sequence
  Description of Artificial Sequence:  Enzymatic Nucleic Acid
auacuguggacaagagg

SEQ ID NO: 4119 - RNA, 17 nt, Artificial Sequence
  Description of Artificial Sequence:  Enzymatic Nucleic Acid
guggacaagagguuugg

SEQ ID NO: 4120 - RNA, 17 nt, Artificial Sequence
  Description of Artificial Sequence:  Enzymatic Nucleic Acid
ggacaagagguuuggca

SEQ ID NO: 4121 - RNA, 17 nt, Artificial Sequence
  Description of Artificial Sequence:  Enzymatic Nucleic Acid
agagguuuggcauggau

SEQ ID NO: 4122 - RNA, 17 nt, Artificial Sequence
  Description of Artificial Sequence:  Enzymatic Nucleic Acid
uuuggcauggauuuuaa

SEQ ID NO: 4123 - RNA, 17 nt, Artificial Sequence
  Description of Artificial Sequence:  Enzymatic Nucleic Acid
uuggcauggauuuuaaa

SEQ ID NO: 4124 - RNA, 17 nt, Artificial Sequence
  Description of Artificial Sequence:  Enzymatic Nucleic Acid
auuuuaaagaaauagaa

SEQ ID NO: 4125 - RNA, 17 nt, Artificial Sequence
  Description of Artificial Sequence:  Enzymatic Nucleic Acid
aagaaauagaauuaauu

SEQ ID NO: 4126 - RNA, 17 nt, Artificial Sequence
  Description of Artificial Sequence:  Enzymatic Nucleic Acid
aauuaauuggcucaggu

SEQ ID NO: 4127 - RNA, 17 nt, Artificial Sequence
  Description of Artificial Sequence:  Enzymatic Nucleic Acid
uuggcucagguggauuu

SEQ ID NO: 4128 - RNA, 17 nt, Artificial Sequence
  Description of Artificial Sequence:  Enzymatic Nucleic Acid
gcucagguggauuuggc

SEQ ID NO: 4129 - RNA, 17 nt, Artificial Sequence
  Description of Artificial Sequence:  Enzymatic Nucleic Acid
cucagguggauuuggcc

SEQ ID NO: 4130 - RNA, 17 nt, Artificial Sequence
  Description of Artificial Sequence:  Enzymatic Nucleic Acid
guggauuuggccaaguu

SEQ ID NO: 4131 - RNA, 17 nt, Artificial Sequence
  Description of Artificial Sequence:  Enzymatic Nucleic Acid
aaaacacagaauugacg

SEQ ID NO: 4132 - RNA, 17 nt, Artificial Sequence
  Description of Artificial Sequence:  Enzymatic Nucleic Acid
acagaauugacggaaag

SEQ ID NO: 4133 - RNA, 17 nt, Artificial Sequence
  Description of Artificial Sequence:  Enzymatic Nucleic Acid
gaauugacggaaagacu

SEQ ID NO: 4134 - RNA, 17 nt, Artificial Sequence
  Description of Artificial Sequence:  Enzymatic Nucleic Acid
aauugacggaaagacuu

SEQ ID NO: 4135 - RNA, 17 nt, Artificial Sequence
  Description of Artificial Sequence:  Enzymatic Nucleic Acid
gacggaaagacuuacgu

SEQ ID NO: 4136 - RNA, 17 nt, Artificial Sequence
  Description of Artificial Sequence:  Enzymatic Nucleic Acid
auaauaacgagaaggcg

SEQ ID NO: 4137 - RNA, 17 nt, Artificial Sequence
  Description of Artificial Sequence:  Enzymatic Nucleic Acid
aauaacgagaaggcgga

SEQ ID NO: 4138 - RNA, 17 nt, Artificial Sequence
  Description of Artificial Sequence:  Enzymatic Nucleic Acid
aacgagaaggcggagcg

SEQ ID NO: 4139 - RNA, 17 nt, Artificial Sequence
  Description of Artificial Sequence:  Enzymatic Nucleic Acid
gagaaggcggagcguga

SEQ ID NO: 4140 - RNA, 17 nt, Artificial Sequence
  Description of Artificial Sequence:  Enzymatic Nucleic Acid
agaaggcggagcgugaa

SEQ ID NO: 4141 - RNA, 17 nt, Artificial Sequence
  Description of Artificial Sequence:  Enzymatic Nucleic Acid
cggagcgugaaguaaaa

SEQ ID NO: 4142 - RNA, 17 nt, Artificial Sequence
  Description of Artificial Sequence:  Enzymatic Nucleic Acid
aaagcauuggcaaaacu

SEQ ID NO: 4143 - RNA, 17 nt, Artificial Sequence
  Description of Artificial Sequence:  Enzymatic Nucleic Acid
caaaacuugaucaugua

SEQ ID NO: 4144 - RNA, 17 nt, Artificial Sequence
  Description of Artificial Sequence:  Enzymatic Nucleic Acid
acuacaauggcuguugg

SEQ ID NO: 4145 - RNA, 17 nt, Artificial Sequence
  Description of Artificial Sequence:  Enzymatic Nucleic Acid
uggcuguugggauggau

SEQ ID NO: 4146 - RNA, 17 nt, Artificial Sequence
  Description of Artificial Sequence:  Enzymatic Nucleic Acid
ggcuguugggauggauu

SEQ ID NO: 4147 - RNA, 17 nt, Artificial Sequence
  Description of Artificial Sequence:  Enzymatic Nucleic Acid
gcuguugggauggauuu

SEQ ID NO: 4148 - RNA, 17 nt, Artificial Sequence
  Description of Artificial Sequence:  Enzymatic Nucleic Acid
guugggauggauuugau

SEQ ID NO: 4149 - RNA, 17 nt, Artificial Sequence
  Description of Artificial Sequence:  Enzymatic Nucleic Acid
uugggauggauuugauu

SEQ ID NO: 4150 - RNA, 17 nt, Artificial Sequence
  Description of Artificial Sequence:  Enzymatic Nucleic Acid
auggauuugauuaugau

SEQ ID NO: 4151 - RNA, 17 nt, Artificial Sequence
  Description of Artificial Sequence:  Enzymatic Nucleic Acid
uugauuaugauccugag

SEQ ID NO: 4152 - RNA, 17 nt, Artificial Sequence
  Description of Artificial Sequence:  Enzymatic Nucleic Acid
augauccugagaccagu

SEQ ID NO: 4153 - RNA, 17 nt, Artificial Sequence
  Description of Artificial Sequence:  Enzymatic Nucleic Acid
gauccugagaccaguga

SEQ ID NO: 4154 - RNA, 17 nt, Artificial Sequence
  Description of Artificial Sequence:  Enzymatic Nucleic Acid
agaccagugaugauucu

SEQ ID NO: 4155 - RNA, 17 nt, Artificial Sequence
  Description of Artificial Sequence:  Enzymatic Nucleic Acid
ccagugaugauucucuu

SEQ ID NO: 4156 - RNA, 17 nt, Artificial Sequence
  Description of Artificial Sequence:  Enzymatic Nucleic Acid
auucucuugagagcagu

SEQ ID NO: 4157 - RNA, 17 nt, Artificial Sequence
  Description of Artificial Sequence:  Enzymatic Nucleic Acid
ucucuugagagcaguga

SEQ ID NO: 4158 - RNA, 17 nt, Artificial Sequence
  Description of Artificial Sequence:  Enzymatic Nucleic Acid
agagcagugauuaugau

SEQ ID NO: 4159 - RNA, 17 nt, Artificial Sequence
  Description of Artificial Sequence:  Enzymatic Nucleic Acid
gugauuaugauccugag

SEQ ID NO: 4160 - RNA, 17 nt, Artificial Sequence
  Description of Artificial Sequence:  Enzymatic Nucleic Acid
augauccugagaacagc

SEQ ID NO: 4161 - RNA, 17 nt, Artificial Sequence
  Description of Artificial Sequence:  Enzymatic Nucleic Acid
gauccugagaacagcaa

SEQ ID NO: 4162 - RNA, 17 nt, Artificial Sequence
  Description of Artificial Sequence:  Enzymatic Nucleic Acid
uaguucaaggucaaaga

SEQ ID NO: 4163 - RNA, 17 nt, Artificial Sequence
  Description of Artificial Sequence:  Enzymatic Nucleic Acid
aggucaaagacuaagug

SEQ ID NO: 4164 - RNA, 17 nt, Artificial Sequence
  Description of Artificial Sequence:  Enzymatic Nucleic Acid
auccaaauggaauucug

SEQ ID NO: 4165 - RNA, 17 nt, Artificial Sequence
  Description of Artificial Sequence:  Enzymatic Nucleic Acid
uccaaauggaauucugu

SEQ ID NO: 4166 - RNA, 17 nt, Artificial Sequence
  Description of Artificial Sequence:  Enzymatic Nucleic Acid
aauucugugauaaaggg

SEQ ID NO: 4167 - RNA, 17 nt, Artificial Sequence
  Description of Artificial Sequence:  Enzymatic Nucleic Acid
gugauaaagggaccuug

SEQ ID NO: 4168 - RNA, 17 nt, Artificial Sequence
  Description of Artificial Sequence:  Enzymatic Nucleic Acid
ugauaaagggaccuugg

SEQ ID NO: 4169 - RNA, 17 nt, Artificial Sequence
  Description of Artificial Sequence:  Enzymatic Nucleic Acid
gauaaagggaccuugga

SEQ ID NO: 4170 - RNA, 17 nt, Artificial Sequence
  Description of Artificial Sequence:  Enzymatic Nucleic Acid
gggaccuuggaacaaug

SEQ ID NO: 4171 - RNA, 17 nt, Artificial Sequence
  Description of Artificial Sequence:  Enzymatic Nucleic Acid
ggaccuuggaacaaugg

SEQ ID NO: 4172 - RNA, 17 nt, Artificial Sequence
  Description of Artificial Sequence:  Enzymatic Nucleic Acid
ggaacaauggauugaaa

SEQ ID NO: 4173 - RNA, 17 nt, Artificial Sequence
  Description of Artificial Sequence:  Enzymatic Nucleic Acid
gaacaauggauugaaaa

SEQ ID NO: 4174 - RNA, 17 nt, Artificial Sequence
  Description of Artificial Sequence:  Enzymatic Nucleic Acid
aauggauugaaaaaaga

SEQ ID NO: 4175 - RNA, 17 nt, Artificial Sequence
  Description of Artificial Sequence:  Enzymatic Nucleic Acid
ugaaaaaagaagaggcg

SEQ ID NO: 4176 - RNA, 17 nt, Artificial Sequence
  Description of Artificial Sequence:  Enzymatic Nucleic Acid
aaaaagaagaggcgaga

SEQ ID NO: 4177 - RNA, 17 nt, Artificial Sequence
  Description of Artificial Sequence:  Enzymatic Nucleic Acid
aaagaagaggcgagaaa

SEQ ID NO: 4178 - RNA, 17 nt, Artificial Sequence
  Description of Artificial Sequence:  Enzymatic Nucleic Acid
gaagaggcgagaaacua

SEQ ID NO: 4179 - RNA, 17 nt, Artificial Sequence
  Description of Artificial Sequence:  Enzymatic Nucleic Acid
agaggcgagaaacuaga

SEQ ID NO: 4180 - RNA, 17 nt, Artificial Sequence
  Description of Artificial Sequence:  Enzymatic Nucleic Acid
agaaacuagacaaaguu

SEQ ID NO: 4181 - RNA, 17 nt, Artificial Sequence
  Description of Artificial Sequence:  Enzymatic Nucleic Acid
aaaguuuuggcuuugga

SEQ ID NO: 4182 - RNA, 17 nt, Artificial Sequence
  Description of Artificial Sequence:  Enzymatic Nucleic Acid
uuggcuuuggaacucuu

SEQ ID NO: 4183 - RNA, 17 nt, Artificial Sequence
  Description of Artificial Sequence:  Enzymatic Nucleic Acid
uggcuuuggaacucuuu

SEQ ID NO: 4184 - RNA, 17 nt, Artificial Sequence
  Description of Artificial Sequence:  Enzymatic Nucleic Acid
aacucuuugaacaaaua

SEQ ID NO: 4185 - RNA, 17 nt, Artificial Sequence
  Description of Artificial Sequence:  Enzymatic Nucleic Acid
uaacaaaagggguggau

SEQ ID NO: 4186 - RNA, 17 nt, Artificial Sequence
  Description of Artificial Sequence:  Enzymatic Nucleic Acid
aacaaaagggguggauu

SEQ ID NO: 4187 - RNA, 17 nt, Artificial Sequence
  Description of Artificial Sequence:  Enzymatic Nucleic Acid
acaaaagggguggauua

SEQ ID NO: 4188 - RNA, 17 nt, Artificial Sequence
  Description of Artificial Sequence:  Enzymatic Nucleic Acid
aaagggguggauuauau

SEQ ID NO: 4189 - RNA, 17 nt, Artificial Sequence
  Description of Artificial Sequence:  Enzymatic Nucleic Acid
aagggguggauuauaua

SEQ ID NO: 4190 - RNA, 17 nt, Artificial Sequence
  Description of Artificial Sequence:  Enzymatic Nucleic Acid
aauucauagagaucuua

SEQ ID NO: 4191 - RNA, 17 nt, Artificial Sequence
  Description of Artificial Sequence:  Enzymatic Nucleic Acid
uucauagagaucuuaag

SEQ ID NO: 4192 - RNA, 17 nt, Artificial Sequence
  Description of Artificial Sequence:  Enzymatic Nucleic Acid
ucuuaguagauacaaaa

SEQ ID NO: 4193 - RNA, 17 nt, Artificial Sequence
  Description of Artificial Sequence:  Enzymatic Nucleic Acid
caaguaaagauuggaga

SEQ ID NO: 4194 - RNA, 17 nt, Artificial Sequence
  Description of Artificial Sequence:  Enzymatic Nucleic Acid
uaaagauuggagacuuu

SEQ ID NO: 4195 - RNA, 17 nt, Artificial Sequence
  Description of Artificial Sequence:  Enzymatic Nucleic Acid
aaagauuggagacuuug

SEQ ID NO: 4196 - RNA, 17 nt, Artificial Sequence
  Description of Artificial Sequence:  Enzymatic Nucleic Acid
agauuggagacuuugga

SEQ ID NO: 4197 - RNA, 17 nt, Artificial Sequence
  Description of Artificial Sequence:  Enzymatic Nucleic Acid
gagacuuuggacuugua

SEQ ID NO: 4198 - RNA, 17 nt, Artificial Sequence
  Description of Artificial Sequence:  Enzymatic Nucleic Acid
agacuuuggacuuguaa

SEQ ID NO: 4199 - RNA, 17 nt, Artificial Sequence
  Description of Artificial Sequence:  Enzymatic Nucleic Acid
acaucucugaaaaauga

SEQ ID NO: 4200 - RNA, 17 nt, Artificial Sequence
  Description of Artificial Sequence:  Enzymatic Nucleic Acid
ugaaaaaugauggaaag

SEQ ID NO: 4201 - RNA, 17 nt, Artificial Sequence
  Description of Artificial Sequence:  Enzymatic Nucleic Acid
aaaaugauggaaagcga

SEQ ID NO: 4202 - RNA, 17 nt, Artificial Sequence
  Description of Artificial Sequence:  Enzymatic Nucleic Acid
aaaugauggaaagcgaa

SEQ ID NO: 4203 - RNA, 17 nt, Artificial Sequence
  Description of Artificial Sequence:  Enzymatic Nucleic Acid
uggaaagcgaacaagga

SEQ ID NO: 4204 - RNA, 17 nt, Artificial Sequence
  Description of Artificial Sequence:  Enzymatic Nucleic Acid
gcgaacaaggaguaagg

SEQ ID NO: 4205 - RNA, 17 nt, Artificial Sequence
  Description of Artificial Sequence:  Enzymatic Nucleic Acid
cgaacaaggaguaaggg

SEQ ID NO: 4206 - RNA, 17 nt, Artificial Sequence
  Description of Artificial Sequence:  Enzymatic Nucleic Acid
aggaguaagggaacuuu

SEQ ID NO: 4207 - RNA, 17 nt, Artificial Sequence
  Description of Artificial Sequence:  Enzymatic Nucleic Acid
ggaguaagggaacuuug

SEQ ID NO: 4208 - RNA, 17 nt, Artificial Sequence
  Description of Artificial Sequence:  Enzymatic Nucleic Acid
gaguaagggaacuuugc

SEQ ID NO: 4209 - RNA, 17 nt, Artificial Sequence
  Description of Artificial Sequence:  Enzymatic Nucleic Acid
aacuuugcgauacauga

SEQ ID NO: 4210 - RNA, 17 nt, Artificial Sequence
  Description of Artificial Sequence:  Enzymatic Nucleic Acid
cgauacaugagcccaga

SEQ ID NO: 4211 - RNA, 17 nt, Artificial Sequence
  Description of Artificial Sequence:  Enzymatic Nucleic Acid
ugagcccagaacagauu

SEQ ID NO: 4212 - RNA, 17 nt, Artificial Sequence
  Description of Artificial Sequence:  Enzymatic Nucleic Acid
ccagaacagauuucuuc

SEQ ID NO: 4213 - RNA, 17 nt, Artificial Sequence
  Description of Artificial Sequence:  Enzymatic Nucleic Acid
cuucgcaagacuaugga

SEQ ID NO: 4214 - RNA, 17 nt, Artificial Sequence
  Description of Artificial Sequence:  Enzymatic Nucleic Acid
aagacuauggaaaggaa

SEQ ID NO: 4215 - RNA, 17 nt, Artificial Sequence
  Description of Artificial Sequence:  Enzymatic Nucleic Acid
agacuauggaaaggaag

SEQ ID NO: 4216 - RNA, 17 nt, Artificial Sequence
  Description of Artificial Sequence:  Enzymatic Nucleic Acid
uauggaaaggaagugga

SEQ ID NO: 4217 - RNA, 17 nt, Artificial Sequence
  Description of Artificial Sequence:  Enzymatic Nucleic Acid
auggaaaggaaguggac

SEQ ID NO: 4218 - RNA, 17 nt, Artificial Sequence
  Description of Artificial Sequence:  Enzymatic Nucleic Acid
aaggaaguggaccucua

SEQ ID NO: 4219 - RNA, 17 nt, Artificial Sequence
  Description of Artificial Sequence:  Enzymatic Nucleic Acid
aggaaguggaccucuac

SEQ ID NO: 4220 - RNA, 17 nt, Artificial Sequence
  Description of Artificial Sequence:  Enzymatic Nucleic Acid
uacgcuuuggggcuaau

SEQ ID NO: 4221 - RNA, 17 nt, Artificial Sequence
  Description of Artificial Sequence:  Enzymatic Nucleic Acid
acgcuuuggggcuaauu

SEQ ID NO: 4222 - RNA, 17 nt, Artificial Sequence
  Description of Artificial Sequence:  Enzymatic Nucleic Acid
cgcuuuggggcuaauuc

SEQ ID NO: 4223 - RNA, 17 nt, Artificial Sequence
  Description of Artificial Sequence:  Enzymatic Nucleic Acid
uucuugcugaacuucuu

SEQ ID NO: 4224 - RNA, 17 nt, Artificial Sequence
  Description of Artificial Sequence:  Enzymatic Nucleic Acid
auguaugugacacugcu

SEQ ID NO: 4225 - RNA, 17 nt, Artificial Sequence
  Description of Artificial Sequence:  Enzymatic Nucleic Acid
cugcuuuugaaacauca

SEQ ID NO: 4226 - RNA, 17 nt, Artificial Sequence
  Description of Artificial Sequence:  Enzymatic Nucleic Acid
uuuucacagaccuacgg

SEQ ID NO: 4227 - RNA, 17 nt, Artificial Sequence
  Description of Artificial Sequence:  Enzymatic Nucleic Acid
agaccuacgggauggca

SEQ ID NO: 4228 - RNA, 17 nt, Artificial Sequence
  Description of Artificial Sequence:  Enzymatic Nucleic Acid
gaccuacgggauggcau

SEQ ID NO: 4229 - RNA, 17 nt, Artificial Sequence
  Description of Artificial Sequence:  Enzymatic Nucleic Acid
accuacgggauggcauc

SEQ ID NO: 4230 - RNA, 17 nt, Artificial Sequence
  Description of Artificial Sequence:  Enzymatic Nucleic Acid
uacgggauggcaucauc

SEQ ID NO: 4231 - RNA, 17 nt, Artificial Sequence
  Description of Artificial Sequence:  Enzymatic Nucleic Acid
ucaucucagauauauuu

SEQ ID NO: 4232 - RNA, 17 nt, Artificial Sequence
  Description of Artificial Sequence:  Enzymatic Nucleic Acid
auauauuugauaaaaaa

SEQ ID NO: 4233 - RNA, 17 nt, Artificial Sequence
  Description of Artificial Sequence:  Enzymatic Nucleic Acid
auaaaaaagaaaaaacu

SEQ ID NO: 4234 - RNA, 17 nt, Artificial Sequence
  Description of Artificial Sequence:  Enzymatic Nucleic Acid
cuucuacagaaauuacu

SEQ ID NO: 4235 - RNA, 17 nt, Artificial Sequence
  Description of Artificial Sequence:  Enzymatic Nucleic Acid
cucucaaagaaaccuga

SEQ ID NO: 4236 - RNA, 17 nt, Artificial Sequence
  Description of Artificial Sequence:  Enzymatic Nucleic Acid
agaaaccugaggaucga

SEQ ID NO: 4237 - RNA, 17 nt, Artificial Sequence
  Description of Artificial Sequence:  Enzymatic Nucleic Acid
aaaccugaggaucgacc

SEQ ID NO: 4238 - RNA, 17 nt, Artificial Sequence
  Description of Artificial Sequence:  Enzymatic Nucleic Acid
aaccugaggaucgaccu

SEQ ID NO: 4239 - RNA, 17 nt, Artificial Sequence
  Description of Artificial Sequence:  Enzymatic Nucleic Acid
ugaggaucgaccuaaca

SEQ ID NO: 4240 - RNA, 17 nt, Artificial Sequence
  Description of Artificial Sequence:  Enzymatic Nucleic Acid
acacaucugaaauacua

SEQ ID NO: 4241 - RNA, 17 nt, Artificial Sequence
  Description of Artificial Sequence:  Enzymatic Nucleic Acid
aauacuaaggaccuuga

SEQ ID NO: 4242 - RNA, 17 nt, Artificial Sequence
  Description of Artificial Sequence:  Enzymatic Nucleic Acid
auacuaaggaccuugac

SEQ ID NO: 4243 - RNA, 17 nt, Artificial Sequence
  Description of Artificial Sequence:  Enzymatic Nucleic Acid
aggaccuugacugugug

SEQ ID NO: 4244 - RNA, 17 nt, Artificial Sequence
  Description of Artificial Sequence:  Enzymatic Nucleic Acid
gacuguguggaagaaaa

SEQ ID NO: 4245 - RNA, 17 nt, Artificial Sequence
  Description of Artificial Sequence:  Enzymatic Nucleic Acid
acuguguggaagaaaag

SEQ ID NO: 4246 - RNA, 17 nt, Artificial Sequence
  Description of Artificial Sequence:  Enzymatic Nucleic Acid
guguggaagaaaagccc

SEQ ID NO: 4247 - RNA, 17 nt, Artificial Sequence
  Description of Artificial Sequence:  Enzymatic Nucleic Acid
aaagcccagagaaaaau

SEQ ID NO: 4248 - RNA, 17 nt, Artificial Sequence
  Description of Artificial Sequence:  Enzymatic Nucleic Acid
agcccagagaaaaauga

SEQ ID NO: 4249 - RNA, 17 nt, Artificial Sequence
  Description of Artificial Sequence:  Enzymatic Nucleic Acid
agaaaaaugaacgacac

SEQ ID NO: 4250 - RNA, 17 nt, Artificial Sequence
  Description of Artificial Sequence:  Enzymatic Nucleic Acid
aaaugaacgacacacau

SEQ ID NO: 4251 - RNA, 17 nt, Artificial Sequence
  Description of Artificial Sequence:  Enzymatic Nucleic Acid
acauguuagagcccuuc

SEQ ID NO: 4252 - RNA, 17 nt, Artificial Sequence
  Description of Artificial Sequence:  Enzymatic Nucleic Acid
gcccuucugaaaaagua

SEQ ID NO: 4253 - RNA, 17 nt, Artificial Sequence
  Description of Artificial Sequence:  Enzymatic Nucleic Acid
cugcuucugauaugcag

SEQ ID NO: 4254 - RNA, 17 nt, Artificial Sequence
  Description of Artificial Sequence:  Enzymatic Nucleic Acid
aucugcuagggaauauc

SEQ ID NO: 4255 - RNA, 17 nt, Artificial Sequence
  Description of Artificial Sequence:  Enzymatic Nucleic Acid
ucugcuagggaauauca

SEQ ID NO: 4256 - RNA, 17 nt, Artificial Sequence
  Description of Artificial Sequence:  Enzymatic Nucleic Acid
cugcuagggaauaucaa

SEQ ID NO: 4257 - RNA, 17 nt, Artificial Sequence
  Description of Artificial Sequence:  Enzymatic Nucleic Acid
uaucaauagauauuuac

SEQ ID NO: 4258 - RNA, 17 nt, Artificial Sequence
  Description of Artificial Sequence:  Enzymatic Nucleic Acid
uuucugcagaaacagaa

SEQ ID NO: 4259 - RNA, 17 nt, Artificial Sequence
  Description of Artificial Sequence:  Enzymatic Nucleic Acid
cagaaacagaaagguuu

SEQ ID NO: 4260 - RNA, 17 nt, Artificial Sequence
  Description of Artificial Sequence:  Enzymatic Nucleic Acid
aacagaaagguuuucuu

SEQ ID NO: 4261 - RNA, 17 nt, Artificial Sequence
  Description of Artificial Sequence:  Enzymatic Nucleic Acid
uuuuuccuggcucaucu

SEQ ID NO: 4262 - RNA, 17 nt, Artificial Sequence
  Description of Artificial Sequence:  Enzymatic Nucleic Acid
uuuuuaaagacagaguc

SEQ ID NO: 4263 - RNA, 17 nt, Artificial Sequence
  Description of Artificial Sequence:  Enzymatic Nucleic Acid
uaaagacagagucucgc

SEQ ID NO: 4264 - RNA, 17 nt, Artificial Sequence
  Description of Artificial Sequence:  Enzymatic Nucleic Acid
guugcccaggcuggagu

SEQ ID NO: 4265 - RNA, 17 nt, Artificial Sequence
  Description of Artificial Sequence:  Enzymatic Nucleic Acid
cccaggcuggagugcaa

SEQ ID NO: 4266 - RNA, 17 nt, Artificial Sequence
  Description of Artificial Sequence:  Enzymatic Nucleic Acid
ccaggcuggagugcaau

SEQ ID NO: 4267 - RNA, 17 nt, Artificial Sequence
  Description of Artificial Sequence:  Enzymatic Nucleic Acid
agugcaaugacacaguc

SEQ ID NO: 4268 - RNA, 17 nt, Artificial Sequence
  Description of Artificial Sequence:  Enzymatic Nucleic Acid
acagucuuggcucacug

SEQ ID NO: 4269 - RNA, 17 nt, Artificial Sequence
  Description of Artificial Sequence:  Enzymatic Nucleic Acid
ugccucuuggguucaag

SEQ ID NO: 4270 - RNA, 17 nt, Artificial Sequence
  Description of Artificial Sequence:  Enzymatic Nucleic Acid
gccucuuggguucaagu

SEQ ID NO: 4271 - RNA, 17 nt, Artificial Sequence
  Description of Artificial Sequence:  Enzymatic Nucleic Acid
guucaagugauucuccu

SEQ ID NO: 4272 - RNA, 17 nt, Artificial Sequence
  Description of Artificial Sequence:  Enzymatic Nucleic Acid
agccuccugaguagcug

SEQ ID NO: 4273 - RNA, 17 nt, Artificial Sequence
  Description of Artificial Sequence:  Enzymatic Nucleic Acid
gaguagcuggauuacag

SEQ ID NO: 4274 - RNA, 17 nt, Artificial Sequence
  Description of Artificial Sequence:  Enzymatic Nucleic Acid
aguagcuggauuacagg

SEQ ID NO: 4275 - RNA, 17 nt, Artificial Sequence
  Description of Artificial Sequence:  Enzymatic Nucleic Acid
ggauuacaggcaugugc

SEQ ID NO: 4276 - RNA, 17 nt, Artificial Sequence
  Description of Artificial Sequence:  Enzymatic Nucleic Acid
uuaauaaagacaggguu

SEQ ID NO: 4277 - RNA, 17 nt, Artificial Sequence
  Description of Artificial Sequence:  Enzymatic Nucleic Acid
uaaagacaggguuucac

SEQ ID NO: 4278 - RNA, 17 nt, Artificial Sequence
  Description of Artificial Sequence:  Enzymatic Nucleic Acid
aaagacaggguuucacc

SEQ ID NO: 4279 - RNA, 17 nt, Artificial Sequence
  Description of Artificial Sequence:  Enzymatic Nucleic Acid
accauguuggccaggcu

SEQ ID NO: 4280 - RNA, 17 nt, Artificial Sequence
  Description of Artificial Sequence:  Enzymatic Nucleic Acid
guuggccaggcuggucu

SEQ ID NO: 4281 - RNA, 17 nt, Artificial Sequence
  Description of Artificial Sequence:  Enzymatic Nucleic Acid
gccaggcuggucucaaa

SEQ ID NO: 4282 - RNA, 17 nt, Artificial Sequence
  Description of Artificial Sequence:  Enzymatic Nucleic Acid
aaacuccugaccucaag

SEQ ID NO: 4283 - RNA, 17 nt, Artificial Sequence
  Description of Artificial Sequence:  Enzymatic Nucleic Acid
ccugccucggccuccca

SEQ ID NO: 4284 - RNA, 17 nt, Artificial Sequence
  Description of Artificial Sequence:  Enzymatic Nucleic Acid
aaagugcugggauuaca

SEQ ID NO: 4285 - RNA, 17 nt, Artificial Sequence
  Description of Artificial Sequence:  Enzymatic Nucleic Acid
aagugcugggauuacag

SEQ ID NO: 4286 - RNA, 17 nt, Artificial Sequence
  Description of Artificial Sequence:  Enzymatic Nucleic Acid
agugcugggauuacagg

SEQ ID NO: 4287 - RNA, 17 nt, Artificial Sequence
  Description of Artificial Sequence:  Enzymatic Nucleic Acid
ggauuacagggaugagc

SEQ ID NO: 4288 - RNA, 17 nt, Artificial Sequence
  Description of Artificial Sequence:  Enzymatic Nucleic Acid
gauuacagggaugagcc

SEQ ID NO: 4289 - RNA, 17 nt, Artificial Sequence
  Description of Artificial Sequence:  Enzymatic Nucleic Acid
auuacagggaugagcca

SEQ ID NO: 4290 - RNA, 17 nt, Artificial Sequence
  Description of Artificial Sequence:  Enzymatic Nucleic Acid
acagggaugagccaccg

SEQ ID NO: 4291 - RNA, 17 nt, Artificial Sequence
  Description of Artificial Sequence:  Enzymatic Nucleic Acid
guucuaaagauggaaaa

SEQ ID NO: 4292 - RNA, 17 nt, Artificial Sequence
  Description of Artificial Sequence:  Enzymatic Nucleic Acid
cuaaagauggaaaaacc

SEQ ID NO: 4293 - RNA, 17 nt, Artificial Sequence
  Description of Artificial Sequence:  Enzymatic Nucleic Acid
uaaagauggaaaaacca

SEQ ID NO: 4294 - RNA, 17 nt, Artificial Sequence
  Description of Artificial Sequence:  Enzymatic Nucleic Acid
cuauuaaugaaucaauc

SEQ ID NO: 4295 - RNA, 17 nt, Artificial Sequence
  Description of Artificial Sequence:  Enzymatic Nucleic Acid
cgcuuuuaggccaaaaa

SEQ ID NO: 4296 - RNA, 17 nt, Artificial Sequence
  Description of Artificial Sequence:  Enzymatic Nucleic Acid
aaauguaagaucguucu

SEQ ID NO: 4297 - RNA, 17 nt, Artificial Sequence
  Description of Artificial Sequence:  Enzymatic Nucleic Acid
agccagcuggagaaaua

SEQ ID NO: 4298 - RNA, 17 nt, Artificial Sequence
  Description of Artificial Sequence:  Enzymatic Nucleic Acid
gccagcuggagaaauau

SEQ ID NO: 4299 - RNA, 17 nt, Artificial Sequence
  Description of Artificial Sequence:  Enzymatic Nucleic Acid
cagcuggagaaauaugg

SEQ ID NO: 4300 - RNA, 17 nt, Artificial Sequence
  Description of Artificial Sequence:  Enzymatic Nucleic Acid
agaaauaugguacucau

SEQ ID NO: 4301 - RNA, 17 nt, Artificial Sequence
  Description of Artificial Sequence:  Enzymatic Nucleic Acid
aaaaaagugauguacaa

SEQ ID NO: 4302 - RNA, 15 nt, Artificial Sequence
  Description of Artificial Sequence:  Enzymatic Nucleic Acid
uuuacauuucaaguu

SEQ ID NO: 4303 - RNA, 15 nt, Artificial Sequence
  Description of Artificial Sequence:  Enzymatic Nucleic Acid
ucaaguuauaauaga

SEQ ID NO: 4304 - RNA, 15 nt, Artificial Sequence
  Description of Artificial Sequence:  Enzymatic Nucleic Acid
gccaaauuagcuguu

SEQ ID NO: 4305 - RNA, 15 nt, Artificial Sequence
  Description of Artificial Sequence:  Enzymatic Nucleic Acid
ccaaauuagcuguug

SEQ ID NO: 4306 - RNA, 13 nt, Artificial Sequence
  Description of Artificial Sequence:  Enzymatic Nucleic Acid
uuggcucaggugg

SEQ ID NO: 4307 - RNA, 15 nt, Artificial Sequence
  Description of Artificial Sequence:  Enzymatic Nucleic Acid
auuggcucaggugga

SEQ ID NO: 4308 - RNA, 13 nt, Artificial Sequence
  Description of Artificial Sequence:  Enzymatic Nucleic Acid
uggaauucuguga

SEQ ID NO: 4309 - RNA, 15 nt, Artificial Sequence
  Description of Artificial Sequence:  Enzymatic Nucleic Acid
auggaauucugugau

SEQ ID NO: 4310 - RNA, 13 nt, Artificial Sequence
  Description of Artificial Sequence:  Enzymatic Nucleic Acid
agagaucuuaagc

SEQ ID NO: 4311 - RNA, 13 nt, Artificial Sequence
  Description of Artificial Sequence:  Enzymatic Nucleic Acid
gacgauugcaauc

SEQ ID NO: 4312 - RNA, 15 nt, Artificial Sequence
  Description of Artificial Sequence:  Enzymatic Nucleic Acid
acaccguuggaucgc

SEQ ID NO: 4313 - RNA, 13 nt, Artificial Sequence
  Description of Artificial Sequence:  Enzymatic Nucleic Acid
uugcccagaagaa

SEQ ID NO: 4314 - RNA, 15 nt, Artificial Sequence
  Description of Artificial Sequence:  Enzymatic Nucleic Acid
ggaauucugugauaa

SEQ ID NO: 4315 - RNA, 13 nt, Artificial Sequence
  Description of Artificial Sequence:  Enzymatic Nucleic Acid
gagaucuuaagcc

SEQ ID NO: 4316 - RNA, 15 nt, Artificial Sequence
  Description of Artificial Sequence:  Enzymatic Nucleic Acid
agagaucuuaagcca

SEQ ID NO: 4317 - RNA, 13 nt, Artificial Sequence
  Description of Artificial Sequence:  Enzymatic Nucleic Acid
acuggcauacaug

SEQ ID NO: 4318 - RNA, 15 nt, Artificial Sequence
  Description of Artificial Sequence:  Enzymatic Nucleic Acid
cauucgcuaaaugag

SEQ ID NO: 4319 - RNA, 13 nt, Artificial Sequence
  Description of Artificial Sequence:  Enzymatic Nucleic Acid
gagaaggcggagc

SEQ ID NO: 4320 - RNA, 13 nt, Artificial Sequence
  Description of Artificial Sequence:  Enzymatic Nucleic Acid
ccguacguuaaga

SEQ ID NO: 4321 - RNA, 15 nt, Artificial Sequence
  Description of Artificial Sequence:  Enzymatic Nucleic Acid
acgaagaguuaccuu

SEQ ID NO: 4322 - RNA, 15 nt, Artificial Sequence
  Description of Artificial Sequence:  Enzymatic Nucleic Acid
agagguuuggcaugg

SEQ ID NO: 4323 - RNA, 15 nt, Artificial Sequence
  Description of Artificial Sequence:  Enzymatic Nucleic Acid
gggaccuuggaacaa

SEQ ID NO: 4324 - RNA, 15 nt, Artificial Sequence
  Description of Artificial Sequence:  Enzymatic Nucleic Acid
aaggaguaagggaac

SEQ ID NO: 4325 - RNA, 15 nt, Artificial Sequence
  Description of Artificial Sequence:  Enzymatic Nucleic Acid
ccuggcucaucucuu

SEQ ID NO: 4326 - RNA, 15 nt, Artificial Sequence
  Description of Artificial Sequence:  Enzymatic Nucleic Acid
gaucguucucugccu

SEQ ID NO: 4327 - RNA, 15 nt, Artificial Sequence
  Description of Artificial Sequence:  Enzymatic Nucleic Acid
uacucgcugucuguc

SEQ ID NO: 4328 - RNA, 15 nt, Artificial Sequence
  Description of Artificial Sequence:  Enzymatic Nucleic Acid
gcaguucuuccaucu

SEQ ID NO: 4329 - RNA, 15 nt, Artificial Sequence
  Description of Artificial Sequence:  Enzymatic Nucleic Acid
augagcccagaacag

SEQ ID NO: 4330 - RNA, 15 nt, Artificial Sequence
  Description of Artificial Sequence:  Enzymatic Nucleic Acid
cuggcucaucucuuu

SEQ ID NO: 4331 - RNA, 15 nt, Artificial Sequence
  Description of Artificial Sequence:  Enzymatic Nucleic Acid
aucguucucugccuc

SEQ ID NO: 4332 - RNA, 15 nt, Artificial Sequence
  Description of Artificial Sequence:  Enzymatic Nucleic Acid
acucgcugucuguca

SEQ ID NO: 4333 - RNA, 15 nt, Artificial Sequence
  Description of Artificial Sequence:  Enzymatic Nucleic Acid
cgggggugcaugggc

SEQ ID NO: 4334 - RNA, 15 nt, Artificial Sequence
  Description of Artificial Sequence:  Enzymatic Nucleic Acid
acaauuggccgcuaa

SEQ ID NO: 4335 - RNA, 15 nt, Artificial Sequence
  Description of Artificial Sequence:  Enzymatic Nucleic Acid
acuaccuguccucug

SEQ ID NO: 4336 - RNA, 15 nt, Artificial Sequence
  Description of Artificial Sequence:  Enzymatic Nucleic Acid
acuacgugugagucc

SEQ ID NO: 4337 - RNA, 15 nt, Artificial Sequence
  Description of Artificial Sequence:  Enzymatic Nucleic Acid
ugcgugcauuuugga

SEQ ID NO: 4338 - RNA, 15 nt, Artificial Sequence
  Description of Artificial Sequence:  Enzymatic Nucleic Acid
uggaacaauggauug

SEQ ID NO: 4339 - RNA, 15 nt, Artificial Sequence
  Description of Artificial Sequence:  Enzymatic Nucleic Acid
ucaaguaauccaccu

SEQ ID NO: 4340 - RNA, 15 nt, Artificial Sequence
  Description of Artificial Sequence:  Enzymatic Nucleic Acid
aggugaagguagauc

SEQ ID NO: 4341 - RNA, 15 nt, Artificial Sequence
  Description of Artificial Sequence:  Enzymatic Nucleic Acid
aacaauuggccgcua

SEQ ID NO: 4342 - RNA, 15 nt, Artificial Sequence
  Description of Artificial Sequence:  Enzymatic Nucleic Acid
ccuuccugacaugaa

SEQ ID NO: 4343 - RNA, 15 nt, Artificial Sequence
  Description of Artificial Sequence:  Enzymatic Nucleic Acid
uuuuccuggcucauc

SEQ ID NO: 4344 - RNA, 15 nt, Artificial Sequence
  Description of Artificial Sequence:  Enzymatic Nucleic Acid
aguuccucaugugca

SEQ ID NO: 4345 - RNA, 13 nt, Artificial Sequence
  Description of Artificial Sequence:  Enzymatic Nucleic Acid
gcggauaucuaca

SEQ ID NO: 4346 - RNA, 15 nt, Artificial Sequence
  Description of Artificial Sequence:  Enzymatic Nucleic Acid
ggcggauaucuacaa

SEQ ID NO: 4347 - RNA, 15 nt, Artificial Sequence
  Description of Artificial Sequence:  Enzymatic Nucleic Acid
cggauaucuacaagg

SEQ ID NO: 4348 - RNA, 13 nt, Artificial Sequence
  Description of Artificial Sequence:  Enzymatic Nucleic Acid
auaucuacaaggc

SEQ ID NO: 4349 - RNA, 15 nt, Artificial Sequence
  Description of Artificial Sequence:  Enzymatic Nucleic Acid
uacaugucauggagu

SEQ ID NO: 4350 - RNA, 15 nt, Artificial Sequence
  Description of Artificial Sequence:  Enzymatic Nucleic Acid
agugcauugaguagg

SEQ ID NO: 4351 - RNA, 13 nt, Artificial Sequence
  Description of Artificial Sequence:  Enzymatic Nucleic Acid
acgacucggagcu

SEQ ID NO: 4352 - RNA, 15 nt, Artificial Sequence
  Description of Artificial Sequence:  Enzymatic Nucleic Acid
ucugagucaggcgac

SEQ ID NO: 4353 - RNA, 13 nt, Artificial Sequence
  Description of Artificial Sequence:  Enzymatic Nucleic Acid
ugcagcccagugg

SEQ ID NO: 4354 - RNA, 13 nt, Artificial Sequence
  Description of Artificial Sequence:  Enzymatic Nucleic Acid
gcagcccaguggu

SEQ ID NO: 4355 - RNA, 13 nt, Artificial Sequence
  Description of Artificial Sequence:  Enzymatic Nucleic Acid
cccuccagcgcug

SEQ ID NO: 4356 - RNA, 13 nt, Artificial Sequence
  Description of Artificial Sequence:  Enzymatic Nucleic Acid
agaaucaagagcu

SEQ ID NO: 4357 - RNA, 15 nt, Artificial Sequence
  Description of Artificial Sequence:  Enzymatic Nucleic Acid
gagaaucaagagcuc

SEQ ID NO: 4358 - RNA, 13 nt, Artificial Sequence
  Description of Artificial Sequence:  Enzymatic Nucleic Acid
gauggcugaggac

SEQ ID NO: 4359 - RNA, 15 nt, Artificial Sequence
  Description of Artificial Sequence:  Enzymatic Nucleic Acid
agauggcugaggaca

SEQ ID NO: 4360 - RNA, 15 nt, Artificial Sequence
  Description of Artificial Sequence:  Enzymatic Nucleic Acid
acaaggccucuguga

SEQ ID NO: 4361 - RNA, 13 nt, Artificial Sequence
  Description of Artificial Sequence:  Enzymatic Nucleic Acid
ggccucugugaaa

SEQ ID NO: 4362 - RNA, 15 nt, Artificial Sequence
  Description of Artificial Sequence:  Enzymatic Nucleic Acid
ugaaagcccagguga

SEQ ID NO: 4363 - RNA, 13 nt, Artificial Sequence
  Description of Artificial Sequence:  Enzymatic Nucleic Acid
guggaccagcugc

SEQ ID NO: 4364 - RNA, 13 nt, Artificial Sequence
  Description of Artificial Sequence:  Enzymatic Nucleic Acid
ugcagcuggaaga

SEQ ID NO: 4365 - RNA, 15 nt, Artificial Sequence
  Description of Artificial Sequence:  Enzymatic Nucleic Acid
augcagcuggaagau

SEQ ID NO: 4366 - RNA, 13 nt, Artificial Sequence
  Description of Artificial Sequence:  Enzymatic Nucleic Acid
ggaggccgagcag

SEQ ID NO: 4367 - RNA, 15 nt, Artificial Sequence
  Description of Artificial Sequence:  Enzymatic Nucleic Acid
aggaggccgagcagc

SEQ ID NO: 4368 - RNA, 13 nt, Artificial Sequence
  Description of Artificial Sequence:  Enzymatic Nucleic Acid
agcagcacaagau

SEQ ID NO: 4369 - RNA, 15 nt, Artificial Sequence
  Description of Artificial Sequence:  Enzymatic Nucleic Acid
gagcagcacaagauu

SEQ ID NO: 4370 - RNA, 15 nt, Artificial Sequence
  Description of Artificial Sequence:  Enzymatic Nucleic Acid
gcagcacaagauugu

SEQ ID NO: 4371 - RNA, 15 nt, Artificial Sequence
  Description of Artificial Sequence:  Enzymatic Nucleic Acid
ggauaucuacaaggc

SEQ ID NO: 4372 - RNA, 13 nt, Artificial Sequence
  Description of Artificial Sequence:  Enzymatic Nucleic Acid
aggagcagcugga

SEQ ID NO: 4373 - RNA, 15 nt, Artificial Sequence
  Description of Artificial Sequence:  Enzymatic Nucleic Acid
aagugccaguaucag

SEQ ID NO: 4374 - RNA, 13 nt, Artificial Sequence
  Description of Artificial Sequence:  Enzymatic Nucleic Acid
caugucauggagu

SEQ ID NO: 4375 - RNA, 15 nt, Artificial Sequence
  Description of Artificial Sequence:  Enzymatic Nucleic Acid
acaugucauggagug

SEQ ID NO: 4376 - RNA, 13 nt, Artificial Sequence
  Description of Artificial Sequence:  Enzymatic Nucleic Acid
cacgucugcggaa

SEQ ID NO: 4377 - RNA, 15 nt, Artificial Sequence
  Description of Artificial Sequence:  Enzymatic Nucleic Acid
ucggaaccaggucug

SEQ ID NO: 4378 - RNA, 15 nt, Artificial Sequence
  Description of Artificial Sequence:  Enzymatic Nucleic Acid
cccuccagcgcugcc

SEQ ID NO: 4379 - RNA, 15 nt, Artificial Sequence
  Description of Artificial Sequence:  Enzymatic Nucleic Acid
cuccagcgcugccug

SEQ ID NO: 4380 - RNA, 13 nt, Artificial Sequence
  Description of Artificial Sequence:  Enzymatic Nucleic Acid
agcgcugccugga

SEQ ID NO: 4381 - RNA, 13 nt, Artificial Sequence
  Description of Artificial Sequence:  Enzymatic Nucleic Acid
ucaagagcuccga

SEQ ID NO: 4382 - RNA, 15 nt, Artificial Sequence
  Description of Artificial Sequence:  Enzymatic Nucleic Acid
aucaagagcuccgag

SEQ ID NO: 4383 - RNA, 13 nt, Artificial Sequence
  Description of Artificial Sequence:  Enzymatic Nucleic Acid
gccucugugaaag

SEQ ID NO: 4384 - RNA, 15 nt, Artificial Sequence
  Description of Artificial Sequence:  Enzymatic Nucleic Acid
ggccucugugaaagc

SEQ ID NO: 4385 - RNA, 13 nt, Artificial Sequence
  Description of Artificial Sequence:  Enzymatic Nucleic Acid
uggagagugagcg

SEQ ID NO: 4386 - RNA, 15 nt, Artificial Sequence
  Description of Artificial Sequence:  Enzymatic Nucleic Acid
caagauugugaugga

SEQ ID NO: 4387 - RNA, 13 nt, Artificial Sequence
  Description of Artificial Sequence:  Enzymatic Nucleic Acid
gaggaagcggcau

SEQ ID NO: 4388 - RNA, 15 nt, Artificial Sequence
  Description of Artificial Sequence:  Enzymatic Nucleic Acid
ugaggaagcggcaug

SEQ ID NO: 4389 - RNA, 15 nt, Artificial Sequence
  Description of Artificial Sequence:  Enzymatic Nucleic Acid
agugccaguaucagg

SEQ ID NO: 4390 - RNA, 13 nt, Artificial Sequence
  Description of Artificial Sequence:  Enzymatic Nucleic Acid
acuccggcguaga

SEQ ID NO: 4391 - RNA, 15 nt, Artificial Sequence
  Description of Artificial Sequence:  Enzymatic Nucleic Acid
gugacgcgugucaca

SEQ ID NO: 4392 - RNA, 15 nt, Artificial Sequence
  Description of Artificial Sequence:  Enzymatic Nucleic Acid
ugcaaguuccaggag

SEQ ID NO: 4393 - RNA, 15 nt, Artificial Sequence
  Description of Artificial Sequence:  Enzymatic Nucleic Acid
agggaguacagcaaa

SEQ ID NO: 4394 - RNA, 15 nt, Artificial Sequence
  Description of Artificial Sequence:  Enzymatic Nucleic Acid
ccuaccucuccucuc

SEQ ID NO: 4395 - RNA, 15 nt, Artificial Sequence
  Description of Artificial Sequence:  Enzymatic Nucleic Acid
cgcugcucuuuuugu

SEQ ID NO: 4396 - RNA, 15 nt, Artificial Sequence
  Description of Artificial Sequence:  Enzymatic Nucleic Acid
ggcagcucuuccucc

SEQ ID NO: 4397 - RNA, 15 nt, Artificial Sequence
  Description of Artificial Sequence:  Enzymatic Nucleic Acid
agcgugcagguggac

SEQ ID NO: 4398 - RNA, 15 nt, Artificial Sequence
  Description of Artificial Sequence:  Enzymatic Nucleic Acid
cagcugcagagggag

SEQ ID NO: 4399 - RNA, 15 nt, Artificial Sequence
  Description of Artificial Sequence:  Enzymatic Nucleic Acid
gccuaccucuccucu

SEQ ID NO: 4400 - RNA, 15 nt, Artificial Sequence
  Description of Artificial Sequence:  Enzymatic Nucleic Acid
uuguucccuucuguc

SEQ ID NO: 4401 - RNA, 15 nt, Artificial Sequence
  Description of Artificial Sequence:  Enzymatic Nucleic Acid
ugcugcccucuuacc

SEQ ID NO: 4402 - RNA, 15 nt, Artificial Sequence
  Description of Artificial Sequence:  Enzymatic Nucleic Acid
cagagaagugaggac

SEQ ID NO: 4403 - RNA, 15 nt, Artificial Sequence
  Description of Artificial Sequence:  Enzymatic Nucleic Acid
caucgaggucccauc

SEQ ID NO: 4404 - RNA, 15 nt, Artificial Sequence
  Description of Artificial Sequence:  Enzymatic Nucleic Acid
uucugcugucccaag

SEQ ID NO: 4405 - RNA, 15 nt, Artificial Sequence
  Description of Artificial Sequence:  Enzymatic Nucleic Acid
cugacucgcugcucu

SEQ ID NO: 4406 - RNA, 15 nt, Artificial Sequence
  Description of Artificial Sequence:  Enzymatic Nucleic Acid
cccuucugucugcuc

SEQ ID NO: 4407 - RNA, 15 nt, Artificial Sequence
  Description of Artificial Sequence:  Enzymatic Nucleic Acid
gcagcagaucaggac

SEQ ID NO: 4408 - RNA, 15 nt, Artificial Sequence
  Description of Artificial Sequence:  Enzymatic Nucleic Acid
ugaagagaugccagc

SEQ ID NO: 4409 - RNA, 15 nt, Artificial Sequence
  Description of Artificial Sequence:  Enzymatic Nucleic Acid
uccaagaauacgaca

SEQ ID NO: 4410 - RNA, 15 nt, Artificial Sequence
  Description of Artificial Sequence:  Enzymatic Nucleic Acid
aucucaaacagcagc

SEQ ID NO: 4411 - RNA, 15 nt, Artificial Sequence
  Description of Artificial Sequence:  Enzymatic Nucleic Acid
ggcagcagaucagga

SEQ ID NO: 4412 - RNA, 15 nt, Artificial Sequence
  Description of Artificial Sequence:  Enzymatic Nucleic Acid
cggaggagaagagga

SEQ ID NO: 4413 - RNA, 15 nt, Artificial Sequence
  Description of Artificial Sequence:  Enzymatic Nucleic Acid
acaggaggugaucga

SEQ ID NO: 4414 - RNA, 15 nt, Artificial Sequence
  Description of Artificial Sequence:  Enzymatic Nucleic Acid
ccugggagugcugcc

SEQ ID NO: 4415 - RNA, 17 nt, Homo sapiens
uucuggcuauuuuccuc

SEQ ID NO: 4416 - RNA, 17 nt, Homo sapiens
cuggcuauuuuccuccu

SEQ ID NO: 4417 - RNA, 17 nt, Homo sapiens
uggcuauuuuccuccug

SEQ ID NO: 4418 - RNA, 17 nt, Homo sapiens
ggcuauuuuccuccugc

SEQ ID NO: 4419 - RNA, 17 nt, Homo sapiens
gcuauuuuccuccugcc

SEQ ID NO: 4420 - RNA, 17 nt, Homo sapiens
auuuuccuccugccguu

SEQ ID NO: 4421 - RNA, 17 nt, Homo sapiens
ccugccguuccgacucg

SEQ ID NO: 4422 - RNA, 17 nt, Homo sapiens
cugccguuccgacucgg

SEQ ID NO: 4423 - RNA, 17 nt, Homo sapiens
uuccgacucggcaccag

SEQ ID NO: 4424 - RNA, 17 nt, Homo sapiens
accagagucugucucua

SEQ ID NO: 4425 - RNA, 17 nt, Homo sapiens
gagucugucucuacuga

SEQ ID NO: 4426 - RNA, 17 nt, Homo sapiens
gucugucucuacugaga

SEQ ID NO: 4427 - RNA, 17 nt, Homo sapiens
cugucucuacugagaac

SEQ ID NO: 4428 - RNA, 17 nt, Homo sapiens
cagcgcgucagggccga

SEQ ID NO: 4429 - RNA, 17 nt, Homo sapiens
gccgagcucuucacugg

SEQ ID NO: 4430 - RNA, 17 nt, Homo sapiens
cgagcucuucacuggcc

SEQ ID NO: 4431 - RNA, 17 nt, Homo sapiens
gagcucuucacuggccu

SEQ ID NO: 4432 - RNA, 17 nt, Homo sapiens
ggccugcuccgcgcucu

SEQ ID NO: 4433 - RNA, 17 nt, Homo sapiens
uccgcgcucuucaaugc

SEQ ID NO: 4434 - RNA, 17 nt, Homo sapiens
cgcgcucuucaaugcca

SEQ ID NO: 4435 - RNA, 17 nt, Homo sapiens
gcgcucuucaaugccag

SEQ ID NO: 4436 - RNA, 17 nt, Homo sapiens
caggcgcucacccugca

SEQ ID NO: 4437 - RNA, 17 nt, Homo sapiens
cagagcgucccgccucu

SEQ ID NO: 4438 - RNA, 17 nt, Homo sapiens
ucccgccucucaaagag

SEQ ID NO: 4439 - RNA, 17 nt, Homo sapiens
ccgccucucaaagaggg

SEQ ID NO: 4440 - RNA, 17 nt, Homo sapiens
ccgcgaguuuagauagg

SEQ ID NO: 4441 - RNA, 17 nt, Homo sapiens
cgcgaguuuagauagga

SEQ ID NO: 4442 - RNA, 17 nt, Homo sapiens
gcgaguuuagauaggag

SEQ ID NO: 4443 - RNA, 17 nt, Homo sapiens
guuuagauaggagguuc

SEQ ID NO: 4444 - RNA, 17 nt, Homo sapiens
uaggagguuccugccgu

SEQ ID NO: 4445 - RNA, 17 nt, Homo sapiens
aggagguuccugccgug

SEQ ID NO: 4446 - RNA, 17 nt, Homo sapiens
gccgcccucggagcuuu

SEQ ID NO: 4447 - RNA, 17 nt, Homo sapiens
ucggagcuuuuucugug

SEQ ID NO: 4448 - RNA, 17 nt, Homo sapiens
cggagcuuuuucugugg

SEQ ID NO: 4449 - RNA, 17 nt, Homo sapiens
ggagcuuuuucuguggc

SEQ ID NO: 4450 - RNA, 17 nt, Homo sapiens
gagcuuuuucuguggcg

SEQ ID NO: 4451 - RNA, 17 nt, Homo sapiens
agcuuuuucuguggcgc

SEQ ID NO: 4452 - RNA, 17 nt, Homo sapiens
gcgcagcuucuccgccc

SEQ ID NO: 4453 - RNA, 17 nt, Homo sapiens
cgcagcuucuccgcccg

SEQ ID NO: 4454 - RNA, 17 nt, Homo sapiens
cagcuucuccgcccgag

SEQ ID NO: 4455 - RNA, 17 nt, Homo sapiens
cgggggcuccuuagcac

SEQ ID NO: 4456 - RNA, 17 nt, Homo sapiens
gggcuccuuagcacccg

SEQ ID NO: 4457 - RNA, 17 nt, Homo sapiens
ggcuccuuagcacccgg

SEQ ID NO: 4458 - RNA, 17 nt, Homo sapiens
ggggcccucgcccuucc

SEQ ID NO: 4459 - RNA, 17 nt, Homo sapiens
cucgcccuuccgcagcc

SEQ ID NO: 4460 - RNA, 17 nt, Homo sapiens
ucgcccuuccgcagccu

SEQ ID NO: 4461 - RNA, 17 nt, Homo sapiens
cgcagccuucacuccag

SEQ ID NO: 4462 - RNA, 17 nt, Homo sapiens
gcagccuucacuccagc

SEQ ID NO: 4463 - RNA, 17 nt, Homo sapiens
ccuucacuccagcccuc

SEQ ID NO: 4464 - RNA, 17 nt, Homo sapiens
ccagcccucugcucccg

SEQ ID NO: 4465 - RNA, 17 nt, Homo sapiens
ccucugcucccgcacgc

SEQ ID NO: 4466 - RNA, 17 nt, Homo sapiens
caugaagucgccguucu

SEQ ID NO: 4467 - RNA, 17 nt, Homo sapiens
gucgccguucuaccgcu

SEQ ID NO: 4468 - RNA, 17 nt, Homo sapiens
ucgccguucuaccgcug

SEQ ID NO: 4469 - RNA, 17 nt, Homo sapiens
gccguucuaccgcugcc

SEQ ID NO: 4470 - RNA, 17 nt, Homo sapiens
caccaccucuguggaaa

SEQ ID NO: 4471 - RNA, 17 nt, Homo sapiens
aggcaacucggcgguga

SEQ ID NO: 4472 - RNA, 17 nt, Homo sapiens
ggggugcucuucagcac

SEQ ID NO: 4473 - RNA, 17 nt, Homo sapiens
ggugcucuucagcaccg

SEQ ID NO: 4474 - RNA, 17 nt, Homo sapiens
gugcucuucagcaccgg

SEQ ID NO: 4475 - RNA, 17 nt, Homo sapiens
accggccuccugggcaa

SEQ ID NO: 4476 - RNA, 17 nt, Homo sapiens
ggcgcgcucggggcugg

SEQ ID NO: 4477 - RNA, 17 nt, Homo sapiens
guggugcucgcggcguc

SEQ ID NO: 4478 - RNA, 17 nt, Homo sapiens
cgcggcguccacugcgc

SEQ ID NO: 4479 - RNA, 17 nt, Homo sapiens
gcugcccucggucuucu

SEQ ID NO: 4480 - RNA, 17 nt, Homo sapiens
cccucggucuucuacau

SEQ ID NO: 4481 - RNA, 17 nt, Homo sapiens
cucggucuucuacaugc

SEQ ID NO: 4482 - RNA, 17 nt, Homo sapiens
ucggucuucuacaugcu

SEQ ID NO: 4483 - RNA, 17 nt, Homo sapiens
ggucuucuacaugcugg

SEQ ID NO: 4484 - RNA, 17 nt, Homo sapiens
cugacggucaccgacuu

SEQ ID NO: 4485 - RNA, 17 nt, Homo sapiens
caccgacuugcugggca

SEQ ID NO: 4486 - RNA, 17 nt, Homo sapiens
aagugccuccuaagccc

SEQ ID NO: 4487 - RNA, 17 nt, Homo sapiens
ugccuccuaagcccggu

SEQ ID NO: 4488 - RNA, 17 nt, Homo sapiens
ggcugccuacgcucaga

SEQ ID NO: 4489 - RNA, 17 nt, Homo sapiens
ccuacgcucagaaccgg

SEQ ID NO: 4490 - RNA, 17 nt, Homo sapiens
accggagucugcgggug

SEQ ID NO: 4491 - RNA, 17 nt, Homo sapiens
cgggugcuugcgcccgc

SEQ ID NO: 4492 - RNA, 17 nt, Homo sapiens
gcccgcauuggacaacu

SEQ ID NO: 4493 - RNA, 17 nt, Homo sapiens
ggacaacucguugugcc

SEQ ID NO: 4494 - RNA, 17 nt, Homo sapiens
caacucguugugccaag

SEQ ID NO: 4495 - RNA, 17 nt, Homo sapiens
ccaagccuucgccuucu

SEQ ID NO: 4496 - RNA, 17 nt, Homo sapiens
caagccuucgccuucuu

SEQ ID NO: 4497 - RNA, 17 nt, Homo sapiens
cuucgccuucuucaugu

SEQ ID NO: 4498 - RNA, 17 nt, Homo sapiens
uucgccuucuucauguc

SEQ ID NO: 4499 - RNA, 17 nt, Homo sapiens
cgccuucuucauguccu

SEQ ID NO: 4500 - RNA, 17 nt, Homo sapiens
gccuucuucauguccuu

SEQ ID NO: 4501 - RNA, 17 nt, Homo sapiens
cuucauguccuucuuug

SEQ ID NO: 4502 - RNA, 17 nt, Homo sapiens
cauguccuucuuugggc

SEQ ID NO: 4503 - RNA, 17 nt, Homo sapiens
auguccuucuuugggcu

SEQ ID NO: 4504 - RNA, 17 nt, Homo sapiens
guccuucuuugggcucu

SEQ ID NO: 4505 - RNA, 17 nt, Homo sapiens
uccuucuuugggcucuc

SEQ ID NO: 4506 - RNA, 17 nt, Homo sapiens
uuugggcucuccucgac

SEQ ID NO: 4507 - RNA, 17 nt, Homo sapiens
ugggcucuccucgacac

SEQ ID NO: 4508 - RNA, 17 nt, Homo sapiens
gcucuccucgacacugc

SEQ ID NO: 4509 - RNA, 17 nt, Homo sapiens
cugcaacuccuggccau

SEQ ID NO: 4510 - RNA, 17 nt, Homo sapiens
ugcuggcucucccuagg

SEQ ID NO: 4511 - RNA, 17 nt, Homo sapiens
cuggcucucccuagggc

SEQ ID NO: 4512 - RNA, 17 nt, Homo sapiens
cucucccuagggcaccc

SEQ ID NO: 4513 - RNA, 17 nt, Homo sapiens
ggcacccuuucuucuac

SEQ ID NO: 4514 - RNA, 17 nt, Homo sapiens
gcacccuuucuucuacc

SEQ ID NO: 4515 - RNA, 17 nt, Homo sapiens
cacccuuucuucuaccg

SEQ ID NO: 4516 - RNA, 17 nt, Homo sapiens
cccuuucuucuaccgac

SEQ ID NO: 4517 - RNA, 17 nt, Homo sapiens
ccuuucuucuaccgacg

SEQ ID NO: 4518 - RNA, 17 nt, Homo sapiens
uuucuucuaccgacggc

SEQ ID NO: 4519 - RNA, 17 nt, Homo sapiens
cggcacaucacccugcg

SEQ ID NO: 4520 - RNA, 17 nt, Homo sapiens
gagcgccuucucccugg

SEQ ID NO: 4521 - RNA, 17 nt, Homo sapiens
agcgccuucucccuggc

SEQ ID NO: 4522 - RNA, 17 nt, Homo sapiens
cgccuucucccuggcuu

SEQ ID NO: 4523 - RNA, 17 nt, Homo sapiens
cccuggcuuucugcgcg

SEQ ID NO: 4524 - RNA, 17 nt, Homo sapiens
ccuggcuuucugcgcgc

SEQ ID NO: 4525 - RNA, 17 nt, Homo sapiens
cuggcuuucugcgcgcu

SEQ ID NO: 4526 - RNA, 17 nt, Homo sapiens
ugcgcgcuaccuuucau

SEQ ID NO: 4527 - RNA, 17 nt, Homo sapiens
cgcuaccuuucaugggc

SEQ ID NO: 4528 - RNA, 17 nt, Homo sapiens
gcuaccuuucaugggcu

SEQ ID NO: 4529 - RNA, 17 nt, Homo sapiens
cuaccuuucaugggcuu

SEQ ID NO: 4530 - RNA, 17 nt, Homo sapiens
caugggcuucgggaagu

SEQ ID NO: 4531 - RNA, 17 nt, Homo sapiens
augggcuucgggaaguu

SEQ ID NO: 4532 - RNA, 17 nt, Homo sapiens
cgggaaguucgugcagu

SEQ ID NO: 4533 - RNA, 17 nt, Homo sapiens
gggaaguucgugcagua

SEQ ID NO: 4534 - RNA, 17 nt, Homo sapiens
cgugcaguacugccccg

SEQ ID NO: 4535 - RNA, 17 nt, Homo sapiens
cuggugcuuuauccaga

SEQ ID NO: 4536 - RNA, 17 nt, Homo sapiens
uggugcuuuauccagau

SEQ ID NO: 4537 - RNA, 17 nt, Homo sapiens
ggugcuuuauccagaug

SEQ ID NO: 4538 - RNA, 17 nt, Homo sapiens
ugcuuuauccagauggu

SEQ ID NO: 4539 - RNA, 17 nt, Homo sapiens
cagaugguccacgagga

SEQ ID NO: 4540 - RNA, 17 nt, Homo sapiens
ggagggcucgcugucgg

SEQ ID NO: 4541 - RNA, 17 nt, Homo sapiens
cucgcugucggugcugg

SEQ ID NO: 4542 - RNA, 17 nt, Homo sapiens
gcugggguacucugugc

SEQ ID NO: 4543 - RNA, 17 nt, Homo sapiens
gggguacucugugcucu

SEQ ID NO: 4544 - RNA, 17 nt, Homo sapiens
ucugugcucuacuccag

SEQ ID NO: 4545 - RNA, 17 nt, Homo sapiens
ugugcucuacuccagcc

SEQ ID NO: 4546 - RNA, 17 nt, Homo sapiens
gcucuacuccagccuca

SEQ ID NO: 4547 - RNA, 17 nt, Homo sapiens
uccagccucauggcgcu

SEQ ID NO: 4548 - RNA, 17 nt, Homo sapiens
cugcugguccucgccac

SEQ ID NO: 4549 - RNA, 17 nt, Homo sapiens
cugguccucgccaccgu

SEQ ID NO: 4550 - RNA, 17 nt, Homo sapiens
ugcaaccucggcgccau

SEQ ID NO: 4551 - RNA, 17 nt, Homo sapiens
cgcaaccucuaugcgau

SEQ ID NO: 4552 - RNA, 17 nt, Homo sapiens
caaccucuaugcgaugc

SEQ ID NO: 4553 - RNA, 17 nt, Homo sapiens
cccgcgcuccugcacca

SEQ ID NO: 4554 - RNA, 17 nt, Homo sapiens
ggaagcguccccucagc

SEQ ID NO: 4555 - RNA, 17 nt, Homo sapiens
cguccccucagccccug

SEQ ID NO: 4556 - RNA, 17 nt, Homo sapiens
agcuggaucaccuccug

SEQ ID NO: 4557 - RNA, 17 nt, Homo sapiens
gaucaccuccugcugcu

SEQ ID NO: 4558 - RNA, 17 nt, Homo sapiens
accgugcucuucacuau

SEQ ID NO: 4559 - RNA, 17 nt, Homo sapiens
cgugcucuucacuaugu

SEQ ID NO: 4560 - RNA, 17 nt, Homo sapiens
gugcucuucacuaugug

SEQ ID NO: 4561 - RNA, 17 nt, Homo sapiens
ucuucacuauguguucu

SEQ ID NO: 4562 - RNA, 17 nt, Homo sapiens
cuauguguucucugccc

SEQ ID NO: 4563 - RNA, 17 nt, Homo sapiens
uauguguucucugcccg

SEQ ID NO: 4564 - RNA, 17 nt, Homo sapiens
uguguucucugcccgua

SEQ ID NO: 4565 - RNA, 17 nt, Homo sapiens
cugcccguaauuuaucg

SEQ ID NO: 4566 - RNA, 17 nt, Homo sapiens
cccguaauuuaucgcgc

SEQ ID NO: 4567 - RNA, 17 nt, Homo sapiens
ccguaauuuaucgcgcu

SEQ ID NO: 4568 - RNA, 17 nt, Homo sapiens
cguaauuuaucgcgcuu

SEQ ID NO: 4569 - RNA, 17 nt, Homo sapiens
uaauuuaucgcgcuuac

SEQ ID NO: 4570 - RNA, 17 nt, Homo sapiens
aucgcgcuuacuaugga

SEQ ID NO: 4571 - RNA, 17 nt, Homo sapiens
ucgcgcuuacuauggag

SEQ ID NO: 4572 - RNA, 17 nt, Homo sapiens
cgcuuacuauggagcau

SEQ ID NO: 4573 - RNA, 17 nt, Homo sapiens
uggagcauuuaaggaug

SEQ ID NO: 4574 - RNA, 17 nt, Homo sapiens
ggagcauuuaaggaugu

SEQ ID NO: 4575 - RNA, 17 nt, Homo sapiens
gagcauuuaaggauguc

SEQ ID NO: 4576 - RNA, 17 nt, Homo sapiens
aaggaugucaaggagaa

SEQ ID NO: 4577 - RNA, 17 nt, Homo sapiens
caggaccucugaagaag

SEQ ID NO: 4578 - RNA, 17 nt, Homo sapiens
gaagaccuccgagccuu

SEQ ID NO: 4579 - RNA, 17 nt, Homo sapiens
ccgagccuugcgauuuc

SEQ ID NO: 4580 - RNA, 17 nt, Homo sapiens
cuugcgauuucuaucug

SEQ ID NO: 4581 - RNA, 17 nt, Homo sapiens
uugcgauuucuaucugu

SEQ ID NO: 4582 - RNA, 17 nt, Homo sapiens
ugcgauuucuaucugug

SEQ ID NO: 4583 - RNA, 17 nt, Homo sapiens
cgauuucuaucugugau

SEQ ID NO: 4584 - RNA, 17 nt, Homo sapiens
auuucuaucugugauuu

SEQ ID NO: 4585 - RNA, 17 nt, Homo sapiens
ucugugauuucaauugu

SEQ ID NO: 4586 - RNA, 17 nt, Homo sapiens
cugugauuucaauugug

SEQ ID NO: 4587 - RNA, 17 nt, Homo sapiens
ugugauuucaauugugg

SEQ ID NO: 4588 - RNA, 17 nt, Homo sapiens
auuucaauuguggaccc

SEQ ID NO: 4589 - RNA, 17 nt, Homo sapiens
uggacccuuggauuuuu

SEQ ID NO: 4590 - RNA, 17 nt, Homo sapiens
ccuuggauuuuuaucau

SEQ ID NO: 4591 - RNA, 17 nt, Homo sapiens
cuuggauuuuuaucauu

SEQ ID NO: 4592 - RNA, 17 nt, Homo sapiens
uuggauuuuuaucauuu

SEQ ID NO: 4593 - RNA, 17 nt, Homo sapiens
uggauuuuuaucauuuu

SEQ ID NO: 4594 - RNA, 17 nt, Homo sapiens
ggauuuuuaucauuuuc

SEQ ID NO: 4595 - RNA, 17 nt, Homo sapiens
auuuuuaucauuuucag

SEQ ID NO: 4596 - RNA, 17 nt, Homo sapiens
uuuaucauuuucagauc

SEQ ID NO: 4597 - RNA, 17 nt, Homo sapiens
uuaucauuuucagaucu

SEQ ID NO: 4598 - RNA, 17 nt, Homo sapiens
uaucauuuucagaucuc

SEQ ID NO: 4599 - RNA, 17 nt, Homo sapiens
aucauuuucagaucucc

SEQ ID NO: 4600 - RNA, 17 nt, Homo sapiens
uuucagaucuccaguau

SEQ ID NO: 4601 - RNA, 17 nt, Homo sapiens
ucagaucuccaguauuu

SEQ ID NO: 4602 - RNA, 17 nt, Homo sapiens
ucuccaguauuucggau

SEQ ID NO: 4603 - RNA, 17 nt, Homo sapiens
uccaguauuucggauau

SEQ ID NO: 4604 - RNA, 17 nt, Homo sapiens
ccaguauuucggauauu

SEQ ID NO: 4605 - RNA, 17 nt, Homo sapiens
caguauuucggauauuu

SEQ ID NO: 4606 - RNA, 17 nt, Homo sapiens
uuucggauauuuuuuca

SEQ ID NO: 4607 - RNA, 17 nt, Homo sapiens
ucggauauuuuuucaca

SEQ ID NO: 4608 - RNA, 17 nt, Homo sapiens
cggauauuuuuucacaa

SEQ ID NO: 4609 - RNA, 17 nt, Homo sapiens
ggauauuuuuucacaag

SEQ ID NO: 4610 - RNA, 17 nt, Homo sapiens
gauauuuuuucacaaga

SEQ ID NO: 4611 - RNA, 17 nt, Homo sapiens
auauuuuuucacaagau

SEQ ID NO: 4612 - RNA, 17 nt, Homo sapiens
uauuuuuucacaagauu

SEQ ID NO: 4613 - RNA, 17 nt, Homo sapiens
cacaagauuuucauuag

SEQ ID NO: 4614 - RNA, 17 nt, Homo sapiens
acaagauuuucauuaga

SEQ ID NO: 4615 - RNA, 17 nt, Homo sapiens
caagauuuucauuagac

SEQ ID NO: 4616 - RNA, 17 nt, Homo sapiens
aagauuuucauuagacc

SEQ ID NO: 4617 - RNA, 17 nt, Homo sapiens
auuuucauuagaccucu

SEQ ID NO: 4618 - RNA, 17 nt, Homo sapiens
uuuucauuagaccucuu

SEQ ID NO: 4619 - RNA, 17 nt, Homo sapiens
uuagaccucuuagguac

SEQ ID NO: 4620 - RNA, 17 nt, Homo sapiens
agaccucuuagguacag

SEQ ID NO: 4621 - RNA, 17 nt, Homo sapiens
gaccucuuagguacagg

SEQ ID NO: 4622 - RNA, 17 nt, Homo sapiens
ucuuagguacaggagcc

SEQ ID NO: 4623 - RNA, 17 nt, Homo sapiens
gcagcaauuccacuaac

SEQ ID NO: 4624 - RNA, 17 nt, Homo sapiens
cagcaauuccacuaaca

SEQ ID NO: 4625 - RNA, 17 nt, Homo sapiens
auuccacuaacauggaa

SEQ ID NO: 4626 - RNA, 17 nt, Homo sapiens
cauggaauccagucugu

SEQ ID NO: 4627 - RNA, 17 nt, Homo sapiens
aauccagucugugacag

SEQ ID NO: 4628 - RNA, 17 nt, Homo sapiens
gacaguguuuuucacuc

SEQ ID NO: 4629 - RNA, 17 nt, Homo sapiens
acaguguuuuucacucu

SEQ ID NO: 4630 - RNA, 17 nt, Homo sapiens
caguguuuuucacucug

SEQ ID NO: 4631 - RNA, 17 nt, Homo sapiens
aguguuuuucacucugu

SEQ ID NO: 4632 - RNA, 17 nt, Homo sapiens
guguuuuucacucugug

SEQ ID NO: 4633 - RNA, 17 nt, Homo sapiens
uuuucacucugugguaa

SEQ ID NO: 4634 - RNA, 17 nt, Homo sapiens
ucugugguaagcugagg

SEQ ID NO: 4635 - RNA, 17 nt, Homo sapiens
ugaggaauaugucacau

SEQ ID NO: 4636 - RNA, 17 nt, Homo sapiens
gaauaugucacauuuuc

SEQ ID NO: 4637 - RNA, 17 nt, Homo sapiens
ugucacauuuucaguca

SEQ ID NO: 4638 - RNA, 17 nt, Homo sapiens
gucacauuuucagucaa

SEQ ID NO: 4639 - RNA, 17 nt, Homo sapiens
ucacauuuucagucaaa

SEQ ID NO: 4640 - RNA, 17 nt, Homo sapiens
cacauuuucagucaaag

SEQ ID NO: 4641 - RNA, 17 nt, Homo sapiens
uuuucagucaaagaacc

SEQ ID NO: 4642 - RNA, 17 nt, Homo sapiens
auucuggcuauuuuccu

SEQ ID NO: 4643 - RNA, 17 nt, Homo sapiens
cuauuuuccuccugccg

SEQ ID NO: 4644 - RNA, 17 nt, Homo sapiens
uauuuuccuccugccgu

SEQ ID NO: 4645 - RNA, 17 nt, Homo sapiens
uuuuccuccugccguuc

SEQ ID NO: 4646 - RNA, 17 nt, Homo sapiens
uuuccuccugccguucc

SEQ ID NO: 4647 - RNA, 17 nt, Homo sapiens
ccuccugccguuccgac

SEQ ID NO: 4648 - RNA, 17 nt, Homo sapiens
ugccguuccgacucggc

SEQ ID NO: 4649 - RNA, 17 nt, Homo sapiens
guuccgacucggcacca

SEQ ID NO: 4650 - RNA, 17 nt, Homo sapiens
gacucggcaccagaguc

SEQ ID NO: 4651 - RNA, 17 nt, Homo sapiens
cucggcaccagagucug

SEQ ID NO: 4652 - RNA, 17 nt, Homo sapiens
ucggcaccagagucugu

SEQ ID NO: 4653 - RNA, 17 nt, Homo sapiens
ccagagucugucucuac

SEQ ID NO: 4654 - RNA, 17 nt, Homo sapiens
agucugucucuacugag

SEQ ID NO: 4655 - RNA, 17 nt, Homo sapiens
ucugucucuacugagaa

SEQ ID NO: 4656 - RNA, 17 nt, Homo sapiens
gucucuacugagaacgc

SEQ ID NO: 4657 - RNA, 17 nt, Homo sapiens
gagaacgcagcgcguca

SEQ ID NO: 4658 - RNA, 17 nt, Homo sapiens
agcgcgucagggccgag

SEQ ID NO: 4659 - RNA, 17 nt, Homo sapiens
gucagggccgagcucuu

SEQ ID NO: 4660 - RNA, 17 nt, Homo sapiens
ggccgagcucuucacug

SEQ ID NO: 4661 - RNA, 17 nt, Homo sapiens
ccgagcucuucacuggc

SEQ ID NO: 4662 - RNA, 17 nt, Homo sapiens
agcucuucacuggccug

SEQ ID NO: 4663 - RNA, 17 nt, Homo sapiens
cucuucacuggccugcu

SEQ ID NO: 4664 - RNA, 17 nt, Homo sapiens
ucacuggccugcuccgc

SEQ ID NO: 4665 - RNA, 17 nt, Homo sapiens
cacuggccugcuccgcg

SEQ ID NO: 4666 - RNA, 17 nt, Homo sapiens
uggccugcuccgcgcuc

SEQ ID NO: 4667 - RNA, 17 nt, Homo sapiens
gccugcuccgcgcucuu

SEQ ID NO: 4668 - RNA, 17 nt, Homo sapiens
cuccgcgcucuucaaug

SEQ ID NO: 4669 - RNA, 17 nt, Homo sapiens
ccgcgcucuucaaugcc

SEQ ID NO: 4670 - RNA, 17 nt, Homo sapiens
cgcucuucaaugccagc

SEQ ID NO: 4671 - RNA, 17 nt, Homo sapiens
uucaaugccagcgccag

SEQ ID NO: 4672 - RNA, 17 nt, Homo sapiens
ucaaugccagcgccagg

SEQ ID NO: 4673 - RNA, 17 nt, Homo sapiens
gccagcgccaggcgcuc

SEQ ID NO: 4674 - RNA, 17 nt, Homo sapiens
ccagcgccaggcgcuca

SEQ ID NO: 4675 - RNA, 17 nt, Homo sapiens
ccaggcgcucacccugc

SEQ ID NO: 4676 - RNA, 17 nt, Homo sapiens
aggcgcucacccugcag

SEQ ID NO: 4677 - RNA, 17 nt, Homo sapiens
gcgcucacccugcagag

SEQ ID NO: 4678 - RNA, 17 nt, Homo sapiens
cgcucacccugcagagc

SEQ ID NO: 4679 - RNA, 17 nt, Homo sapiens
gcucacccugcagagcg

SEQ ID NO: 4680 - RNA, 17 nt, Homo sapiens
cacccugcagagcgucc

SEQ ID NO: 4681 - RNA, 17 nt, Homo sapiens
agagcgucccgccucuc

SEQ ID NO: 4682 - RNA, 17 nt, Homo sapiens
gagcgucccgccucuca

SEQ ID NO: 4683 - RNA, 17 nt, Homo sapiens
cgucccgccucucaaag

SEQ ID NO: 4684 - RNA, 17 nt, Homo sapiens
gucccgccucucaaaga

SEQ ID NO: 4685 - RNA, 17 nt, Homo sapiens
cccgccucucaaagagg

SEQ ID NO: 4686 - RNA, 17 nt, Homo sapiens
cgccucucaaagagggg

SEQ ID NO: 4687 - RNA, 17 nt, Homo sapiens
ggugugacccgcgaguu

SEQ ID NO: 4688 - RNA, 17 nt, Homo sapiens
gugugacccgcgaguuu

SEQ ID NO: 4689 - RNA, 17 nt, Homo sapiens
ggagguuccugccgugg

SEQ ID NO: 4690 - RNA, 17 nt, Homo sapiens
gagguuccugccguggg

SEQ ID NO: 4691 - RNA, 17 nt, Homo sapiens
guuccugccguggggaa

SEQ ID NO: 4692 - RNA, 17 nt, Homo sapiens
uggggaacaccccgccg

SEQ ID NO: 4693 - RNA, 17 nt, Homo sapiens
gggaacaccccgccgcc

SEQ ID NO: 4694 - RNA, 17 nt, Homo sapiens
ggaacaccccgccgccc

SEQ ID NO: 4695 - RNA, 17 nt, Homo sapiens
gaacaccccgccgcccu

SEQ ID NO: 4696 - RNA, 17 nt, Homo sapiens
caccccgccgcccucgg

SEQ ID NO: 4697 - RNA, 17 nt, Homo sapiens
cccgccgcccucggagc

SEQ ID NO: 4698 - RNA, 17 nt, Homo sapiens
ccgccgcccucggagcu

SEQ ID NO: 4699 - RNA, 17 nt, Homo sapiens
cgccgcccucggagcuu

SEQ ID NO: 4700 - RNA, 17 nt, Homo sapiens
cucggagcuuuuucugu

SEQ ID NO: 4701 - RNA, 17 nt, Homo sapiens
gcuuuuucuguggcgca

SEQ ID NO: 4702 - RNA, 17 nt, Homo sapiens
uguggcgcagcuucucc

SEQ ID NO: 4703 - RNA, 17 nt, Homo sapiens
ggcgcagcuucuccgcc

SEQ ID NO: 4704 - RNA, 17 nt, Homo sapiens
gcagcuucuccgcccga

SEQ ID NO: 4705 - RNA, 17 nt, Homo sapiens
agcuucuccgcccgagc

SEQ ID NO: 4706 - RNA, 17 nt, Homo sapiens
uucuccgcccgagccgc

SEQ ID NO: 4707 - RNA, 17 nt, Homo sapiens
ucuccgcccgagccgcg

SEQ ID NO: 4708 - RNA, 17 nt, Homo sapiens
gcccgagccgcgcgcgg

SEQ ID NO: 4709 - RNA, 17 nt, Homo sapiens
cgcggagcugccggggg

SEQ ID NO: 4710 - RNA, 17 nt, Homo sapiens
ggagcugccgggggcuc

SEQ ID NO: 4711 - RNA, 17 nt, Homo sapiens
ccgggggcuccuuagca

SEQ ID NO: 4712 - RNA, 17 nt, Homo sapiens
gggggcuccuuagcacc

SEQ ID NO: 4713 - RNA, 17 nt, Homo sapiens
ggggcuccuuagcaccc

SEQ ID NO: 4714 - RNA, 17 nt, Homo sapiens
uccuuagcacccgggcg

SEQ ID NO: 4715 - RNA, 17 nt, Homo sapiens
cuuagcacccgggcgcc

SEQ ID NO: 4716 - RNA, 17 nt, Homo sapiens
uuagcacccgggcgccg

SEQ ID NO: 4717 - RNA, 17 nt, Homo sapiens
ccgggcgccggggcccu

SEQ ID NO: 4718 - RNA, 17 nt, Homo sapiens
gccggggcccucgcccu

SEQ ID NO: 4719 - RNA, 17 nt, Homo sapiens
ccggggcccucgcccuu

SEQ ID NO: 4720 - RNA, 17 nt, Homo sapiens
cggggcccucgcccuuc

SEQ ID NO: 4721 - RNA, 17 nt, Homo sapiens
gcccucgcccuuccgca

SEQ ID NO: 4722 - RNA, 17 nt, Homo sapiens
cccucgcccuuccgcag

SEQ ID NO: 4723 - RNA, 17 nt, Homo sapiens
ccucgcccuuccgcagc

SEQ ID NO: 4724 - RNA, 17 nt, Homo sapiens
cgcccuuccgcagccuu

SEQ ID NO: 4725 - RNA, 17 nt, Homo sapiens
ccuuccgcagccuucac

SEQ ID NO: 4726 - RNA, 17 nt, Homo sapiens
uccgcagccuucacucc

SEQ ID NO: 4727 - RNA, 17 nt, Homo sapiens
ccgcagccuucacucca

SEQ ID NO: 4728 - RNA, 17 nt, Homo sapiens
cagccuucacuccagcc

SEQ ID NO: 4729 - RNA, 17 nt, Homo sapiens
gccuucacuccagcccu

SEQ ID NO: 4730 - RNA, 17 nt, Homo sapiens
cuucacuccagcccucu

SEQ ID NO: 4731 - RNA, 17 nt, Homo sapiens
uucacuccagcccucug

SEQ ID NO: 4732 - RNA, 17 nt, Homo sapiens
acuccagcccucugcuc

SEQ ID NO: 4733 - RNA, 17 nt, Homo sapiens
cuccagcccucugcucc

SEQ ID NO: 4734 - RNA, 17 nt, Homo sapiens
uccagcccucugcuccc

SEQ ID NO: 4735 - RNA, 17 nt, Homo sapiens
cagcccucugcucccgc

SEQ ID NO: 4736 - RNA, 17 nt, Homo sapiens
cccucugcucccgcacg

SEQ ID NO: 4737 - RNA, 17 nt, Homo sapiens
cucugcucccgcacgcc

SEQ ID NO: 4738 - RNA, 17 nt, Homo sapiens
ucugcucccgcacgcca

SEQ ID NO: 4739 - RNA, 17 nt, Homo sapiens
gcucccgcacgccauga

SEQ ID NO: 4740 - RNA, 17 nt, Homo sapiens
ccgcacgccaugaaguc

SEQ ID NO: 4741 - RNA, 17 nt, Homo sapiens
cgcacgccaugaagucg

SEQ ID NO: 4742 - RNA, 17 nt, Homo sapiens
gaagucgccguucuacc

SEQ ID NO: 4743 - RNA, 17 nt, Homo sapiens
cgccguucuaccgcugc

SEQ ID NO: 4744 - RNA, 17 nt, Homo sapiens
cguucuaccgcugccag

SEQ ID NO: 4745 - RNA, 17 nt, Homo sapiens
ucuaccgcugccagaac

SEQ ID NO: 4746 - RNA, 17 nt, Homo sapiens
accgcugccagaacacc

SEQ ID NO: 4747 - RNA, 17 nt, Homo sapiens
ccgcugccagaacacca

SEQ ID NO: 4748 - RNA, 17 nt, Homo sapiens
gccagaacaccaccucu

SEQ ID NO: 4749 - RNA, 17 nt, Homo sapiens
cagaacaccaccucugu

SEQ ID NO: 4750 - RNA, 17 nt, Homo sapiens
agaacaccaccucugug

SEQ ID NO: 4751 - RNA, 17 nt, Homo sapiens
aacaccaccucugugga

SEQ ID NO: 4752 - RNA, 17 nt, Homo sapiens
acaccaccucuguggaa

SEQ ID NO: 4753 - RNA, 17 nt, Homo sapiens
accaccucuguggaaaa

SEQ ID NO: 4754 - RNA, 17 nt, Homo sapiens
aaaaaggcaacucggcg

SEQ ID NO: 4755 - RNA, 17 nt, Homo sapiens
aaggcaacucggcggug

SEQ ID NO: 4756 - RNA, 17 nt, Homo sapiens
cggggugcucuucagca

SEQ ID NO: 4757 - RNA, 17 nt, Homo sapiens
gggugcucuucagcacc

SEQ ID NO: 4758 - RNA, 17 nt, Homo sapiens
ugcucuucagcaccggc

SEQ ID NO: 4759 - RNA, 17 nt, Homo sapiens
ucuucagcaccggccuc

SEQ ID NO: 4760 - RNA, 17 nt, Homo sapiens
uucagcaccggccuccu

SEQ ID NO: 4761 - RNA, 17 nt, Homo sapiens
gcaccggccuccugggc

SEQ ID NO: 4762 - RNA, 17 nt, Homo sapiens
caccggccuccugggca

SEQ ID NO: 4763 - RNA, 17 nt, Homo sapiens
ccggccuccugggcaac

SEQ ID NO: 4764 - RNA, 17 nt, Homo sapiens
cggccuccugggcaacc

SEQ ID NO: 4765 - RNA, 17 nt, Homo sapiens
uccugggcaaccugcug

SEQ ID NO: 4766 - RNA, 17 nt, Homo sapiens
ugggcaaccugcuggcc

SEQ ID NO: 4767 - RNA, 17 nt, Homo sapiens
gggcaaccugcuggccc

SEQ ID NO: 4768 - RNA, 17 nt, Homo sapiens
caaccugcuggcccugg

SEQ ID NO: 4769 - RNA, 17 nt, Homo sapiens
cugcuggcccuggggcu

SEQ ID NO: 4770 - RNA, 17 nt, Homo sapiens
ugcuggcccuggggcug

SEQ ID NO: 4771 - RNA, 17 nt, Homo sapiens
gcuggcccuggggcugc

SEQ ID NO: 4772 - RNA, 17 nt, Homo sapiens
ccuggggcugcuggcgc

SEQ ID NO: 4773 - RNA, 17 nt, Homo sapiens
ggggcugcuggcgcgcu

SEQ ID NO: 4774 - RNA, 17 nt, Homo sapiens
uggcgcgcucggggcug

SEQ ID NO: 4775 - RNA, 17 nt, Homo sapiens
cucggggcugggguggu

SEQ ID NO: 4776 - RNA, 17 nt, Homo sapiens
gguggugcucgcggcgu

SEQ ID NO: 4777 - RNA, 17 nt, Homo sapiens
gcggcguccacugcgcc

SEQ ID NO: 4778 - RNA, 17 nt, Homo sapiens
cggcguccacugcgccc

SEQ ID NO: 4779 - RNA, 17 nt, Homo sapiens
gcguccacugcgcccgc

SEQ ID NO: 4780 - RNA, 17 nt, Homo sapiens
cacugcgcccgcugccc

SEQ ID NO: 4781 - RNA, 17 nt, Homo sapiens
acugcgcccgcugcccu

SEQ ID NO: 4782 - RNA, 17 nt, Homo sapiens
gcgcccgcugcccucgg

SEQ ID NO: 4783 - RNA, 17 nt, Homo sapiens
cccgcugcccucggucu

SEQ ID NO: 4784 - RNA, 17 nt, Homo sapiens
ccgcugcccucggucuu

SEQ ID NO: 4785 - RNA, 17 nt, Homo sapiens
cgcugcccucggucuuc

SEQ ID NO: 4786 - RNA, 17 nt, Homo sapiens
ccucggucuucuacaug

SEQ ID NO: 4787 - RNA, 17 nt, Homo sapiens
cggucuucuacaugcug

SEQ ID NO: 4788 - RNA, 17 nt, Homo sapiens
ucuucuacaugcuggug

SEQ ID NO: 4789 - RNA, 17 nt, Homo sapiens
cuacaugcuggugugug

SEQ ID NO: 4790 - RNA, 17 nt, Homo sapiens
uguguggccugacgguc

SEQ ID NO: 4791 - RNA, 17 nt, Homo sapiens
guguggccugacgguca

SEQ ID NO: 4792 - RNA, 17 nt, Homo sapiens
ugacggucaccgacuug

SEQ ID NO: 4793 - RNA, 17 nt, Homo sapiens
acggucaccgacuugcu

SEQ ID NO: 4794 - RNA, 17 nt, Homo sapiens
ucaccgacuugcugggc

SEQ ID NO: 4795 - RNA, 17 nt, Homo sapiens
cgacuugcugggcaagu

SEQ ID NO: 4796 - RNA, 17 nt, Homo sapiens
ugcugggcaagugccuc

SEQ ID NO: 4797 - RNA, 17 nt, Homo sapiens
gcaagugccuccuaagc

SEQ ID NO: 4798 - RNA, 17 nt, Homo sapiens
caagugccuccuaagcc

SEQ ID NO: 4799 - RNA, 17 nt, Homo sapiens
agugccuccuaagcccg

SEQ ID NO: 4800 - RNA, 17 nt, Homo sapiens
gugccuccuaagcccgg

SEQ ID NO: 4801 - RNA, 17 nt, Homo sapiens
uccuaagcccgguggug

SEQ ID NO: 4802 - RNA, 17 nt, Homo sapiens
ccuaagcccgguggugc

SEQ ID NO: 4803 - RNA, 17 nt, Homo sapiens
gguggugcuggcugccu

SEQ ID NO: 4804 - RNA, 17 nt, Homo sapiens
gugcuggcugccuacgc

SEQ ID NO: 4805 - RNA, 17 nt, Homo sapiens
cuggcugccuacgcuca

SEQ ID NO: 4806 - RNA, 17 nt, Homo sapiens
uggcugccuacgcucag

SEQ ID NO: 4807 - RNA, 17 nt, Homo sapiens
gccuacgcucagaaccg

SEQ ID NO: 4808 - RNA, 17 nt, Homo sapiens
cuacgcucagaaccgga

SEQ ID NO: 4809 - RNA, 17 nt, Homo sapiens
cucagaaccggagucug

SEQ ID NO: 4810 - RNA, 17 nt, Homo sapiens
ccggagucugcgggugc

SEQ ID NO: 4811 - RNA, 17 nt, Homo sapiens
gcgggugcuugcgcccg

SEQ ID NO: 4812 - RNA, 17 nt, Homo sapiens
gcuugcgcccgcauugg

SEQ ID NO: 4813 - RNA, 17 nt, Homo sapiens
cuugcgcccgcauugga

SEQ ID NO: 4814 - RNA, 17 nt, Homo sapiens
gcgcccgcauuggacaa

SEQ ID NO: 4815 - RNA, 17 nt, Homo sapiens
cauuggacaacucguug

SEQ ID NO: 4816 - RNA, 17 nt, Homo sapiens
uggacaacucguugugc

SEQ ID NO: 4817 - RNA, 17 nt, Homo sapiens
cguugugccaagccuuc

SEQ ID NO: 4818 - RNA, 17 nt, Homo sapiens
guugugccaagccuucg

SEQ ID NO: 4819 - RNA, 17 nt, Homo sapiens
ugccaagccuucgccuu

SEQ ID NO: 4820 - RNA, 17 nt, Homo sapiens
gccaagccuucgccuuc

SEQ ID NO: 4821 - RNA, 17 nt, Homo sapiens
gccuucgccuucuucau

SEQ ID NO: 4822 - RNA, 17 nt, Homo sapiens
ccuucgccuucuucaug

SEQ ID NO: 4823 - RNA, 17 nt, Homo sapiens
ucgccuucuucaugucc

SEQ ID NO: 4824 - RNA, 17 nt, Homo sapiens
ccuucuucauguccuuc

SEQ ID NO: 4825 - RNA, 17 nt, Homo sapiens
uucauguccuucuuugg

SEQ ID NO: 4826 - RNA, 17 nt, Homo sapiens
ucauguccuucuuuggg

SEQ ID NO: 4827 - RNA, 17 nt, Homo sapiens
uguccuucuuugggcuc

SEQ ID NO: 4828 - RNA, 17 nt, Homo sapiens
cuuugggcucuccucga

SEQ ID NO: 4829 - RNA, 17 nt, Homo sapiens
uugggcucuccucgaca

SEQ ID NO: 4830 - RNA, 17 nt, Homo sapiens
gggcucuccucgacacu

SEQ ID NO: 4831 - RNA, 17 nt, Homo sapiens
ggcucuccucgacacug

SEQ ID NO: 4832 - RNA, 17 nt, Homo sapiens
uccucgacacugcaacu

SEQ ID NO: 4833 - RNA, 17 nt, Homo sapiens
cucgacacugcaacucc

SEQ ID NO: 4834 - RNA, 17 nt, Homo sapiens
gacacugcaacuccugg

SEQ ID NO: 4835 - RNA, 17 nt, Homo sapiens
acugcaacuccuggcca

SEQ ID NO: 4836 - RNA, 17 nt, Homo sapiens
ugcaacuccuggccaug

SEQ ID NO: 4837 - RNA, 17 nt, Homo sapiens
gcaacuccuggccaugg

SEQ ID NO: 4838 - RNA, 17 nt, Homo sapiens
cuccuggccauggcacu

SEQ ID NO: 4839 - RNA, 17 nt, Homo sapiens
uccuggccauggcacug

SEQ ID NO: 4840 - RNA, 17 nt, Homo sapiens
gccauggcacuggagug

SEQ ID NO: 4841 - RNA, 17 nt, Homo sapiens
cauggcacuggagugcu

SEQ ID NO: 4842 - RNA, 17 nt, Homo sapiens
uggagugcuggcucucc

SEQ ID NO: 4843 - RNA, 17 nt, Homo sapiens
gugcuggcucucccuag

SEQ ID NO: 4844 - RNA, 17 nt, Homo sapiens
gcuggcucucccuaggg

SEQ ID NO: 4845 - RNA, 17 nt, Homo sapiens
uggcucucccuagggca

SEQ ID NO: 4846 - RNA, 17 nt, Homo sapiens
ggcucucccuagggcac

SEQ ID NO: 4847 - RNA, 17 nt, Homo sapiens
gcucucccuagggcacc

SEQ ID NO: 4848 - RNA, 17 nt, Homo sapiens
ccuagggcacccuuucu

SEQ ID NO: 4849 - RNA, 17 nt, Homo sapiens
uagggcacccuuucuuc

SEQ ID NO: 4850 - RNA, 17 nt, Homo sapiens
agggcacccuuucuucu

SEQ ID NO: 4851 - RNA, 17 nt, Homo sapiens
gggcacccuuucuucua

SEQ ID NO: 4852 - RNA, 17 nt, Homo sapiens
acccuuucuucuaccga

SEQ ID NO: 4853 - RNA, 17 nt, Homo sapiens
cuuucuucuaccgacgg

SEQ ID NO: 4854 - RNA, 17 nt, Homo sapiens
ucuucuaccgacggcac

SEQ ID NO: 4855 - RNA, 17 nt, Homo sapiens
ccgacggcacaucaccc

SEQ ID NO: 4856 - RNA, 17 nt, Homo sapiens
gacggcacaucacccug

SEQ ID NO: 4857 - RNA, 17 nt, Homo sapiens
ggcacaucacccugcgc

SEQ ID NO: 4858 - RNA, 17 nt, Homo sapiens
cacaucacccugcgccu

SEQ ID NO: 4859 - RNA, 17 nt, Homo sapiens
acaucacccugcgccug

SEQ ID NO: 4860 - RNA, 17 nt, Homo sapiens
caucacccugcgccugg

SEQ ID NO: 4861 - RNA, 17 nt, Homo sapiens
cccugcgccugggcgca

SEQ ID NO: 4862 - RNA, 17 nt, Homo sapiens
ccugcgccugggcgcac

SEQ ID NO: 4863 - RNA, 17 nt, Homo sapiens
cugggcgcacugguggc

SEQ ID NO: 4864 - RNA, 17 nt, Homo sapiens
gggcgcacugguggccc

SEQ ID NO: 4865 - RNA, 17 nt, Homo sapiens
cugguggccccgguggu

SEQ ID NO: 4866 - RNA, 17 nt, Homo sapiens
ugguggccccgguggug

SEQ ID NO: 4867 - RNA, 17 nt, Homo sapiens
gguggccccggugguga

SEQ ID NO: 4868 - RNA, 17 nt, Homo sapiens
gugagcgccuucucccu

SEQ ID NO: 4869 - RNA, 17 nt, Homo sapiens
ugagcgccuucucccug

SEQ ID NO: 4870 - RNA, 17 nt, Homo sapiens
gcgccuucucccuggcu

SEQ ID NO: 4871 - RNA, 17 nt, Homo sapiens
gccuucucccuggcuuu

SEQ ID NO: 4872 - RNA, 17 nt, Homo sapiens
ccuucucccuggcuuuc

SEQ ID NO: 4873 - RNA, 17 nt, Homo sapiens
cuucucccuggcuuucu

SEQ ID NO: 4874 - RNA, 17 nt, Homo sapiens
ucccuggcuuucugcgc

SEQ ID NO: 4875 - RNA, 17 nt, Homo sapiens
uggcuuucugcgcgcua

SEQ ID NO: 4876 - RNA, 17 nt, Homo sapiens
cugcgcgcuaccuuuca

SEQ ID NO: 4877 - RNA, 17 nt, Homo sapiens
cgcgcuaccuuucaugg

SEQ ID NO: 4878 - RNA, 17 nt, Homo sapiens
gcgcuaccuuucauggg

SEQ ID NO: 4879 - RNA, 17 nt, Homo sapiens
uaccuuucaugggcuuc

SEQ ID NO: 4880 - RNA, 17 nt, Homo sapiens
ucaugggcuucgggaag

SEQ ID NO: 4881 - RNA, 17 nt, Homo sapiens
guucgugcaguacugcc

SEQ ID NO: 4882 - RNA, 17 nt, Homo sapiens
ugcaguacugccccggc

SEQ ID NO: 4883 - RNA, 17 nt, Homo sapiens
aguacugccccggcacc

SEQ ID NO: 4884 - RNA, 17 nt, Homo sapiens
guacugccccggcaccu

SEQ ID NO: 4885 - RNA, 17 nt, Homo sapiens
uacugccccggcaccug

SEQ ID NO: 4886 - RNA, 17 nt, Homo sapiens
gccccggcaccuggugc

SEQ ID NO: 4887 - RNA, 17 nt, Homo sapiens
cccggcaccuggugcuu

SEQ ID NO: 4888 - RNA, 17 nt, Homo sapiens
ccggcaccuggugcuuu

SEQ ID NO: 4889 - RNA, 17 nt, Homo sapiens
ccuggugcuuuauccag

SEQ ID NO: 4890 - RNA, 17 nt, Homo sapiens
gcuuuauccagaugguc

SEQ ID NO: 4891 - RNA, 17 nt, Homo sapiens
cuuuauccagauggucc

SEQ ID NO: 4892 - RNA, 17 nt, Homo sapiens
agaugguccacgaggag

SEQ ID NO: 4893 - RNA, 17 nt, Homo sapiens
gaugguccacgaggagg

SEQ ID NO: 4894 - RNA, 17 nt, Homo sapiens
aggagggcucgcugucg

SEQ ID NO: 4895 - RNA, 17 nt, Homo sapiens
gggcucgcugucggugc

SEQ ID NO: 4896 - RNA, 17 nt, Homo sapiens
gucggugcugggguacu

SEQ ID NO: 4897 - RNA, 17 nt, Homo sapiens
ugggguacucugugcuc

SEQ ID NO: 4898 - RNA, 17 nt, Homo sapiens
ggguacucugugcucua

SEQ ID NO: 4899 - RNA, 17 nt, Homo sapiens
cucugugcucuacucca

SEQ ID NO: 4900 - RNA, 17 nt, Homo sapiens
cugugcucuacuccagc

SEQ ID NO: 4901 - RNA, 17 nt, Homo sapiens
ugcucuacuccagccuc

SEQ ID NO: 4902 - RNA, 17 nt, Homo sapiens
cucuacuccagccucau

SEQ ID NO: 4903 - RNA, 17 nt, Homo sapiens
ucuacuccagccucaug

SEQ ID NO: 4904 - RNA, 17 nt, Homo sapiens
acuccagccucauggcg

SEQ ID NO: 4905 - RNA, 17 nt, Homo sapiens
cuccagccucauggcgc

SEQ ID NO: 4906 - RNA, 17 nt, Homo sapiens
ccagccucauggcgcug

SEQ ID NO: 4907 - RNA, 17 nt, Homo sapiens
cauggcgcugcuggucc

SEQ ID NO: 4908 - RNA, 17 nt, Homo sapiens
ggcgcugcugguccucg

SEQ ID NO: 4909 - RNA, 17 nt, Homo sapiens
ugcugguccucgccacc

SEQ ID NO: 4910 - RNA, 17 nt, Homo sapiens
gcugguccucgccaccg

SEQ ID NO: 4911 - RNA, 17 nt, Homo sapiens
guccucgccaccgugcu

SEQ ID NO: 4912 - RNA, 17 nt, Homo sapiens
uccucgccaccgugcug

SEQ ID NO: 4913 - RNA, 17 nt, Homo sapiens
cucgccaccgugcugug

SEQ ID NO: 4914 - RNA, 17 nt, Homo sapiens
caccgugcugugcaacc

SEQ ID NO: 4915 - RNA, 17 nt, Homo sapiens
ugcugugcaaccucggc

SEQ ID NO: 4916 - RNA, 17 nt, Homo sapiens
ugugcaaccucggcgcc

SEQ ID NO: 4917 - RNA, 17 nt, Homo sapiens
gugcaaccucggcgcca

SEQ ID NO: 4918 - RNA, 17 nt, Homo sapiens
cucggcgccaugcgcaa

SEQ ID NO: 4919 - RNA, 17 nt, Homo sapiens
ucggcgccaugcgcaac

SEQ ID NO: 4920 - RNA, 17 nt, Homo sapiens
ccaugcgcaaccucuau

SEQ ID NO: 4921 - RNA, 17 nt, Homo sapiens
ugcgcaaccucuaugcg

SEQ ID NO: 4922 - RNA, 17 nt, Homo sapiens
gcgcaaccucuaugcga

SEQ ID NO: 4923 - RNA, 17 nt, Homo sapiens
gcaaccucuaugcgaug

SEQ ID NO: 4924 - RNA, 17 nt, Homo sapiens
ugcgaugcaccggcggc

SEQ ID NO: 4925 - RNA, 17 nt, Homo sapiens
cgaugcaccggcggcug

SEQ ID NO: 4926 - RNA, 17 nt, Homo sapiens
ccggcggcugcagcggc

SEQ ID NO: 4927 - RNA, 17 nt, Homo sapiens
gcggcugcagcggcacc

SEQ ID NO: 4928 - RNA, 17 nt, Homo sapiens
gcagcggcacccgcgcu

SEQ ID NO: 4929 - RNA, 17 nt, Homo sapiens
agcggcacccgcgcucc

SEQ ID NO: 4930 - RNA, 17 nt, Homo sapiens
gcggcacccgcgcuccu

SEQ ID NO: 4931 - RNA, 17 nt, Homo sapiens
acccgcgcuccugcacc

SEQ ID NO: 4932 - RNA, 17 nt, Homo sapiens
ccgcgcuccugcaccag

SEQ ID NO: 4933 - RNA, 17 nt, Homo sapiens
cgcgcuccugcaccagg

SEQ ID NO: 4934 - RNA, 17 nt, Homo sapiens
gcuccugcaccagggac

SEQ ID NO: 4935 - RNA, 17 nt, Homo sapiens
uccugcaccagggacug

SEQ ID NO: 4936 - RNA, 17 nt, Homo sapiens
ccugcaccagggacugu

SEQ ID NO: 4937 - RNA, 17 nt, Homo sapiens
ccagggacugugccgag

SEQ ID NO: 4938 - RNA, 17 nt, Homo sapiens
gacugugccgagccgcg

SEQ ID NO: 4939 - RNA, 17 nt, Homo sapiens
ugccgagccgcgcgcgg

SEQ ID NO: 4940 - RNA, 17 nt, Homo sapiens
gaagcguccccucagcc

SEQ ID NO: 4941 - RNA, 17 nt, Homo sapiens
aagcguccccucagccc

SEQ ID NO: 4942 - RNA, 17 nt, Homo sapiens
agcguccccucagcccc

SEQ ID NO: 4943 - RNA, 17 nt, Homo sapiens
gcguccccucagccccu

SEQ ID NO: 4944 - RNA, 17 nt, Homo sapiens
guccccucagccccugg

SEQ ID NO: 4945 - RNA, 17 nt, Homo sapiens
cccucagccccuggagg

SEQ ID NO: 4946 - RNA, 17 nt, Homo sapiens
ccucagccccuggagga

SEQ ID NO: 4947 - RNA, 17 nt, Homo sapiens
cucagccccuggaggag

SEQ ID NO: 4948 - RNA, 17 nt, Homo sapiens
ucagccccuggaggagc

SEQ ID NO: 4949 - RNA, 17 nt, Homo sapiens
ggaggagcuggaucacc

SEQ ID NO: 4950 - RNA, 17 nt, Homo sapiens
gcuggaucaccuccugc

SEQ ID NO: 4951 - RNA, 17 nt, Homo sapiens
uggaucaccuccugcug

SEQ ID NO: 4952 - RNA, 17 nt, Homo sapiens
ggaucaccuccugcugc

SEQ ID NO: 4953 - RNA, 17 nt, Homo sapiens
aucaccuccugcugcug

SEQ ID NO: 4954 - RNA, 17 nt, Homo sapiens
ucaccuccugcugcugg

SEQ ID NO: 4955 - RNA, 17 nt, Homo sapiens
ccuccugcugcuggcgc

SEQ ID NO: 4956 - RNA, 17 nt, Homo sapiens
ccugcugcuggcgcuga

SEQ ID NO: 4957 - RNA, 17 nt, Homo sapiens
gcuggcgcugaugaccg

SEQ ID NO: 4958 - RNA, 17 nt, Homo sapiens
cugaugaccgugcucuu

SEQ ID NO: 4959 - RNA, 17 nt, Homo sapiens
gaccgugcucuucacua

SEQ ID NO: 4960 - RNA, 17 nt, Homo sapiens
ccgugcucuucacuaug

SEQ ID NO: 4961 - RNA, 17 nt, Homo sapiens
ugcucuucacuaugugu

SEQ ID NO: 4962 - RNA, 17 nt, Homo sapiens
cucuucacuauguguuc

SEQ ID NO: 4963 - RNA, 17 nt, Homo sapiens
auguguucucugcccgu

SEQ ID NO: 4964 - RNA, 17 nt, Homo sapiens
guguucucugcccguaa

SEQ ID NO: 4965 - RNA, 17 nt, Homo sapiens
uucucugcccguaauuu

SEQ ID NO: 4966 - RNA, 17 nt, Homo sapiens
ucucugcccguaauuua

SEQ ID NO: 4967 - RNA, 17 nt, Homo sapiens
uaucgcgcuuacuaugg

SEQ ID NO: 4968 - RNA, 17 nt, Homo sapiens
gcgcuuacuauggagca

SEQ ID NO: 4969 - RNA, 17 nt, Homo sapiens
uauggagcauuuaagga

SEQ ID NO: 4970 - RNA, 17 nt, Homo sapiens
aggaugucaaggagaaa

SEQ ID NO: 4971 - RNA, 17 nt, Homo sapiens
agaaaaacaggaccucu

SEQ ID NO: 4972 - RNA, 17 nt, Homo sapiens
aacaggaccucugaaga

SEQ ID NO: 4973 - RNA, 17 nt, Homo sapiens
acaggaccucugaagaa

SEQ ID NO: 4974 - RNA, 17 nt, Homo sapiens
aggaccucugaagaagc

SEQ ID NO: 4975 - RNA, 17 nt, Homo sapiens
gaagaagcagaagaccu

SEQ ID NO: 4976 - RNA, 17 nt, Homo sapiens
cagaagaccuccgagcc

SEQ ID NO: 4977 - RNA, 17 nt, Homo sapiens
agaagaccuccgagccu

SEQ ID NO: 4978 - RNA, 17 nt, Homo sapiens
aagaccuccgagccuug

SEQ ID NO: 4979 - RNA, 17 nt, Homo sapiens
cuccgagccuugcgauu

SEQ ID NO: 4980 - RNA, 17 nt, Homo sapiens
uccgagccuugcgauuu

SEQ ID NO: 4981 - RNA, 17 nt, Homo sapiens
gcgauuucuaucuguga

SEQ ID NO: 4982 - RNA, 17 nt, Homo sapiens
uuucuaucugugauuuc

SEQ ID NO: 4983 - RNA, 17 nt, Homo sapiens
gugauuucaauugugga

SEQ ID NO: 4984 - RNA, 17 nt, Homo sapiens
uuguggacccuuggauu

SEQ ID NO: 4985 - RNA, 17 nt, Homo sapiens
uguggacccuuggauuu

SEQ ID NO: 4986 - RNA, 17 nt, Homo sapiens
guggacccuuggauuuu

SEQ ID NO: 4987 - RNA, 17 nt, Homo sapiens
uuuuuaucauuuucaga

SEQ ID NO: 4988 - RNA, 17 nt, Homo sapiens
ucauuuucagaucucca

SEQ ID NO: 4989 - RNA, 17 nt, Homo sapiens
uucagaucuccaguauu

SEQ ID NO: 4990 - RNA, 17 nt, Homo sapiens
cagaucuccaguauuuc

SEQ ID NO: 4991 - RNA, 17 nt, Homo sapiens
agaucuccaguauuucg

SEQ ID NO: 4992 - RNA, 17 nt, Homo sapiens
auuuuuucacaagauuu

SEQ ID NO: 4993 - RNA, 17 nt, Homo sapiens
uuuuucacaagauuuuc

SEQ ID NO: 4994 - RNA, 17 nt, Homo sapiens
agauuuucauuagaccu

SEQ ID NO: 4995 - RNA, 17 nt, Homo sapiens
cauuagaccucuuaggu

SEQ ID NO: 4996 - RNA, 17 nt, Homo sapiens
auuagaccucuuaggua

SEQ ID NO: 4997 - RNA, 17 nt, Homo sapiens
uagaccucuuagguaca

SEQ ID NO: 4998 - RNA, 17 nt, Homo sapiens
uuagguacaggagccgg

SEQ ID NO: 4999 - RNA, 17 nt, Homo sapiens
acaggagccggugcagc

SEQ ID NO: 5000 - RNA, 17 nt, Homo sapiens
gccggugcagcaauucc

SEQ ID NO: 5001 - RNA, 17 nt, Homo sapiens
ggugcagcaauuccacu

SEQ ID NO: 5002 - RNA, 17 nt, Homo sapiens
agcaauuccacuaacau

SEQ ID NO: 5003 - RNA, 17 nt, Homo sapiens
gcaauuccacuaacaug

SEQ ID NO: 5004 - RNA, 17 nt, Homo sapiens
aauuccacuaacaugga

SEQ ID NO: 5005 - RNA, 17 nt, Homo sapiens
ccacuaacauggaaucc

SEQ ID NO: 5006 - RNA, 17 nt, Homo sapiens
auggaauccagucugug

SEQ ID NO: 5007 - RNA, 17 nt, Homo sapiens
uggaauccagucuguga

SEQ ID NO: 5008 - RNA, 17 nt, Homo sapiens
auccagucugugacagu

SEQ ID NO: 5009 - RNA, 17 nt, Homo sapiens
ucugugacaguguuuuu

SEQ ID NO: 5010 - RNA, 17 nt, Homo sapiens
uguuuuucacucugugg

SEQ ID NO: 5011 - RNA, 17 nt, Homo sapiens
uuuuucacucuguggua

SEQ ID NO: 5012 - RNA, 17 nt, Homo sapiens
uuucacucugugguaag

SEQ ID NO: 5013 - RNA, 17 nt, Homo sapiens
ugguaagcugaggaaua

SEQ ID NO: 5014 - RNA, 17 nt, Homo sapiens
aauaugucacauuuuca

SEQ ID NO: 5015 - RNA, 17 nt, Homo sapiens
uaugucacauuuucagu

SEQ ID NO: 5016 - RNA, 17 nt, Homo sapiens
acauuuucagucaaaga

SEQ ID NO: 5017 - RNA, 17 nt, Homo sapiens
uuucagucaaagaacca

SEQ ID NO: 5018 - RNA, 17 nt, Homo sapiens
gaauucuggcuauuuuc

SEQ ID NO: 5019 - RNA, 17 nt, Homo sapiens
uuccuccugccguuccg

SEQ ID NO: 5020 - RNA, 17 nt, Homo sapiens
cuccugccguuccgacu

SEQ ID NO: 5021 - RNA, 17 nt, Homo sapiens
ccgacucggcaccagag

SEQ ID NO: 5022 - RNA, 17 nt, Homo sapiens
gcaccagagucugucuc

SEQ ID NO: 5023 - RNA, 17 nt, Homo sapiens
cagagucugucucuacu

SEQ ID NO: 5024 - RNA, 17 nt, Homo sapiens
cugagaacgcagcgcgu

SEQ ID NO: 5025 - RNA, 17 nt, Homo sapiens
agaacgcagcgcgucag

SEQ ID NO: 5026 - RNA, 17 nt, Homo sapiens
aacgcagcgcgucaggg

SEQ ID NO: 5027 - RNA, 17 nt, Homo sapiens
cgcagcgcgucagggcc

SEQ ID NO: 5028 - RNA, 17 nt, Homo sapiens
gcgucagggccgagcuc

SEQ ID NO: 5029 - RNA, 17 nt, Homo sapiens
agggccgagcucuucac

SEQ ID NO: 5030 - RNA, 17 nt, Homo sapiens
cuucacuggccugcucc

SEQ ID NO: 5031 - RNA, 17 nt, Homo sapiens
acuggccugcuccgcgc

SEQ ID NO: 5032 - RNA, 17 nt, Homo sapiens
ccugcuccgcgcucuuc

SEQ ID NO: 5033 - RNA, 17 nt, Homo sapiens
ugcuccgcgcucuucaa

SEQ ID NO: 5034 - RNA, 17 nt, Homo sapiens
ucuucaaugccagcgcc

SEQ ID NO: 5035 - RNA, 17 nt, Homo sapiens
caaugccagcgccaggc

SEQ ID NO: 5036 - RNA, 17 nt, Homo sapiens
augccagcgccaggcgc

SEQ ID NO: 5037 - RNA, 17 nt, Homo sapiens
agcgccaggcgcucacc

SEQ ID NO: 5038 - RNA, 17 nt, Homo sapiens
cgccaggcgcucacccu

SEQ ID NO: 5039 - RNA, 17 nt, Homo sapiens
cucacccugcagagcgu

SEQ ID NO: 5040 - RNA, 17 nt, Homo sapiens
ccugcagagcgucccgc

SEQ ID NO: 5041 - RNA, 17 nt, Homo sapiens
ugcagagcgucccgccu

SEQ ID NO: 5042 - RNA, 17 nt, Homo sapiens
agcgucccgccucucaa

SEQ ID NO: 5043 - RNA, 17 nt, Homo sapiens
aaagaggggugugaccc

SEQ ID NO: 5044 - RNA, 17 nt, Homo sapiens
agaggggugugacccgc

SEQ ID NO: 5045 - RNA, 17 nt, Homo sapiens
ugugacccgcgaguuua

SEQ ID NO: 5046 - RNA, 17 nt, Homo sapiens
acccgcgaguuuagaua

SEQ ID NO: 5047 - RNA, 17 nt, Homo sapiens
gauaggagguuccugcc

SEQ ID NO: 5048 - RNA, 17 nt, Homo sapiens
agguuccugccgugggg

SEQ ID NO: 5049 - RNA, 17 nt, Homo sapiens
uuccugccguggggaac

SEQ ID NO: 5050 - RNA, 17 nt, Homo sapiens
aacaccccgccgcccuc

SEQ ID NO: 5051 - RNA, 17 nt, Homo sapiens
accccgccgcccucgga

SEQ ID NO: 5052 - RNA, 17 nt, Homo sapiens
cccucggagcuuuuucu

SEQ ID NO: 5053 - RNA, 17 nt, Homo sapiens
cuuuuucuguggcgcag

SEQ ID NO: 5054 - RNA, 17 nt, Homo sapiens
uuucuguggcgcagcuu

SEQ ID NO: 5055 - RNA, 17 nt, Homo sapiens
ucuguggcgcagcuucu

SEQ ID NO: 5056 - RNA, 17 nt, Homo sapiens
guggcgcagcuucuccg

SEQ ID NO: 5057 - RNA, 17 nt, Homo sapiens
gcuucuccgcccgagcc

SEQ ID NO: 5058 - RNA, 17 nt, Homo sapiens
ccgcccgagccgcgcgc

SEQ ID NO: 5059 - RNA, 17 nt, Homo sapiens
cccgagccgcgcgcgga

SEQ ID NO: 5060 - RNA, 17 nt, Homo sapiens
cgagccgcgcgcggagc

SEQ ID NO: 5061 - RNA, 17 nt, Homo sapiens
agccgcgcgcggagcug

SEQ ID NO: 5062 - RNA, 17 nt, Homo sapiens
cgcgcggagcugccggg

SEQ ID NO: 5063 - RNA, 17 nt, Homo sapiens
gcggagcugccgggggc

SEQ ID NO: 5064 - RNA, 17 nt, Homo sapiens
ugccgggggcuccuuag

SEQ ID NO: 5065 - RNA, 17 nt, Homo sapiens
gcuccuuagcacccggg

SEQ ID NO: 5066 - RNA, 17 nt, Homo sapiens
gcacccgggcgccgggg

SEQ ID NO: 5067 - RNA, 17 nt, Homo sapiens
acccgggcgccggggcc

SEQ ID NO: 5068 - RNA, 17 nt, Homo sapiens
gcgccggggcccucgcc

SEQ ID NO: 5069 - RNA, 17 nt, Homo sapiens
gggcccucgcccuuccg

SEQ ID NO: 5070 - RNA, 17 nt, Homo sapiens
gcccuuccgcagccuuc

SEQ ID NO: 5071 - RNA, 17 nt, Homo sapiens
cuuccgcagccuucacu

SEQ ID NO: 5072 - RNA, 17 nt, Homo sapiens
ucacuccagcccucugc

SEQ ID NO: 5073 - RNA, 17 nt, Homo sapiens
agcccucugcucccgca

SEQ ID NO: 5074 - RNA, 17 nt, Homo sapiens
cugcucccgcacgccau

SEQ ID NO: 5075 - RNA, 17 nt, Homo sapiens
ucccgcacgccaugaag

SEQ ID NO: 5076 - RNA, 17 nt, Homo sapiens
gccaugaagucgccguu

SEQ ID NO: 5077 - RNA, 17 nt, Homo sapiens
augaagucgccguucua

SEQ ID NO: 5078 - RNA, 17 nt, Homo sapiens
aagucgccguucuaccg

SEQ ID NO: 5079 - RNA, 17 nt, Homo sapiens
guucuaccgcugccaga

SEQ ID NO: 5080 - RNA, 17 nt, Homo sapiens
cuaccgcugccagaaca

SEQ ID NO: 5081 - RNA, 17 nt, Homo sapiens
ccaccucuguggaaaaa

SEQ ID NO: 5082 - RNA, 17 nt, Homo sapiens
ggaaaaaggcaacucgg

SEQ ID NO: 5083 - RNA, 17 nt, Homo sapiens
gcaacucggcggugaug

SEQ ID NO: 5084 - RNA, 17 nt, Homo sapiens
acucggcggugaugggc

SEQ ID NO: 5085 - RNA, 17 nt, Homo sapiens
ggugaugggcggggugc

SEQ ID NO: 5086 - RNA, 17 nt, Homo sapiens
ugggcggggugcucuuc

SEQ ID NO: 5087 - RNA, 17 nt, Homo sapiens
ggcggggugcucuucag

SEQ ID NO: 5088 - RNA, 17 nt, Homo sapiens
gcucuucagcaccggcc

SEQ ID NO: 5089 - RNA, 17 nt, Homo sapiens
cagcaccggccuccugg

SEQ ID NO: 5090 - RNA, 17 nt, Homo sapiens
ccuccugggcaaccugc

SEQ ID NO: 5091 - RNA, 17 nt, Homo sapiens
ggcaaccugcuggcccu

SEQ ID NO: 5092 - RNA, 17 nt, Homo sapiens
accugcuggcccugggg

SEQ ID NO: 5093 - RNA, 17 nt, Homo sapiens
gcccuggggcugcuggc

SEQ ID NO: 5094 - RNA, 17 nt, Homo sapiens
cuggggcugcuggcgcg

SEQ ID NO: 5095 - RNA, 17 nt, Homo sapiens
ggcugcuggcgcgcucg

SEQ ID NO: 5096 - RNA, 17 nt, Homo sapiens
cugcuggcgcgcucggg

SEQ ID NO: 5097 - RNA, 17 nt, Homo sapiens
gcuggcgcgcucggggc

SEQ ID NO: 5098 - RNA, 17 nt, Homo sapiens
cgcucggggcuggggug

SEQ ID NO: 5099 - RNA, 17 nt, Homo sapiens
gggcugggguggugcuc

SEQ ID NO: 5100 - RNA, 17 nt, Homo sapiens
cugggguggugcucgcg

SEQ ID NO: 5101 - RNA, 17 nt, Homo sapiens
gggguggugcucgcggc

SEQ ID NO: 5102 - RNA, 17 nt, Homo sapiens
uggugcucgcggcgucc

SEQ ID NO: 5103 - RNA, 17 nt, Homo sapiens
ugcucgcggcguccacu

SEQ ID NO: 5104 - RNA, 17 nt, Homo sapiens
cucgcggcguccacugc

SEQ ID NO: 5105 - RNA, 17 nt, Homo sapiens
cguccacugcgcccgcu

SEQ ID NO: 5106 - RNA, 17 nt, Homo sapiens
uccacugcgcccgcugc

SEQ ID NO: 5107 - RNA, 17 nt, Homo sapiens
cugcgcccgcugcccuc

SEQ ID NO: 5108 - RNA, 17 nt, Homo sapiens
cgcccgcugcccucggu

SEQ ID NO: 5109 - RNA, 17 nt, Homo sapiens
ugcccucggucuucuac

SEQ ID NO: 5110 - RNA, 17 nt, Homo sapiens
uucuacaugcuggugug

SEQ ID NO: 5111 - RNA, 17 nt, Homo sapiens
acaugcugguguguggc

SEQ ID NO: 5112 - RNA, 17 nt, Homo sapiens
augcugguguguggccu

SEQ ID NO: 5113 - RNA, 17 nt, Homo sapiens
gcugguguguggccuga

SEQ ID NO: 5114 - RNA, 17 nt, Homo sapiens
gguguguggccugacgg

SEQ ID NO: 5115 - RNA, 17 nt, Homo sapiens
gccugacggucaccgac

SEQ ID NO: 5116 - RNA, 17 nt, Homo sapiens
accgacuugcugggcaa

SEQ ID NO: 5117 - RNA, 17 nt, Homo sapiens
cuugcugggcaagugcc

SEQ ID NO: 5118 - RNA, 17 nt, Homo sapiens
cugggcaagugccuccu

SEQ ID NO: 5119 - RNA, 17 nt, Homo sapiens
gggcaagugccuccuaa

SEQ ID NO: 5120 - RNA, 17 nt, Homo sapiens
ccuccuaagcccggugg

SEQ ID NO: 5121 - RNA, 17 nt, Homo sapiens
uaagcccgguggugcug

SEQ ID NO: 5122 - RNA, 17 nt, Homo sapiens
gcccgguggugcuggcu

SEQ ID NO: 5123 - RNA, 17 nt, Homo sapiens
ccgguggugcuggcugc

SEQ ID NO: 5124 - RNA, 17 nt, Homo sapiens
uggugcuggcugccuac

SEQ ID NO: 5125 - RNA, 17 nt, Homo sapiens
ugcuggcugccuacgcu

SEQ ID NO: 5126 - RNA, 17 nt, Homo sapiens
cugccuacgcucagaac

SEQ ID NO: 5127 - RNA, 17 nt, Homo sapiens
gaaccggagucugcggg

SEQ ID NO: 5128 - RNA, 17 nt, Homo sapiens
cggagucugcgggugcu

SEQ ID NO: 5129 - RNA, 17 nt, Homo sapiens
gucugcgggugcuugcg

SEQ ID NO: 5130 - RNA, 17 nt, Homo sapiens
cugcgggugcuugcgcc

SEQ ID NO: 5131 - RNA, 17 nt, Homo sapiens
gggugcuugcgcccgca

SEQ ID NO: 5132 - RNA, 17 nt, Homo sapiens
gugcuugcgcccgcauu

SEQ ID NO: 5133 - RNA, 17 nt, Homo sapiens
uugcgcccgcauuggac

SEQ ID NO: 5134 - RNA, 17 nt, Homo sapiens
gacaacucguugugcca

SEQ ID NO: 5135 - RNA, 17 nt, Homo sapiens
aacucguugugccaagc

SEQ ID NO: 5136 - RNA, 17 nt, Homo sapiens
cucguugugccaagccu

SEQ ID NO: 5137 - RNA, 17 nt, Homo sapiens
ugugccaagccuucgcc

SEQ ID NO: 5138 - RNA, 17 nt, Homo sapiens
aagccuucgccuucuuc

SEQ ID NO: 5139 - RNA, 17 nt, Homo sapiens
uucuucauguccuucuu

SEQ ID NO: 5140 - RNA, 17 nt, Homo sapiens
uucuuugggcucuccuc

SEQ ID NO: 5141 - RNA, 17 nt, Homo sapiens
ucgacacugcaacuccu

SEQ ID NO: 5142 - RNA, 17 nt, Homo sapiens
aacuccuggccauggca

SEQ ID NO: 5143 - RNA, 17 nt, Homo sapiens
uggccauggcacuggag

SEQ ID NO: 5144 - RNA, 17 nt, Homo sapiens
gcacuggagugcuggcu

SEQ ID NO: 5145 - RNA, 17 nt, Homo sapiens
acuggagugcuggcucu

SEQ ID NO: 5146 - RNA, 17 nt, Homo sapiens
gagugcuggcucucccu

SEQ ID NO: 5147 - RNA, 17 nt, Homo sapiens
ucccuagggcacccuuu

SEQ ID NO: 5148 - RNA, 17 nt, Homo sapiens
uaccgacggcacaucac

SEQ ID NO: 5149 - RNA, 17 nt, Homo sapiens
aucacccugcgccuggg

SEQ ID NO: 5150 - RNA, 17 nt, Homo sapiens
cacccugcgccugggcg

SEQ ID NO: 5151 - RNA, 17 nt, Homo sapiens
gcgccugggcgcacugg

SEQ ID NO: 5152 - RNA, 17 nt, Homo sapiens
gccugggcgcacuggug

SEQ ID NO: 5153 - RNA, 17 nt, Homo sapiens
gcgcacugguggccccg

SEQ ID NO: 5154 - RNA, 17 nt, Homo sapiens
cacugguggccccggug

SEQ ID NO: 5155 - RNA, 17 nt, Homo sapiens
uggccccgguggugagc

SEQ ID NO: 5156 - RNA, 17 nt, Homo sapiens
ccccgguggugagcgcc

SEQ ID NO: 5157 - RNA, 17 nt, Homo sapiens
gguggugagcgccuucu

SEQ ID NO: 5158 - RNA, 17 nt, Homo sapiens
uggugagcgccuucucc

SEQ ID NO: 5159 - RNA, 17 nt, Homo sapiens
ucucccuggcuuucugc

SEQ ID NO: 5160 - RNA, 17 nt, Homo sapiens
ggcuuucugcgcgcuac

SEQ ID NO: 5161 - RNA, 17 nt, Homo sapiens
cuuucugcgcgcuaccu

SEQ ID NO: 5162 - RNA, 17 nt, Homo sapiens
uucugcgcgcuaccuuu

SEQ ID NO: 5163 - RNA, 17 nt, Homo sapiens
uuucaugggcuucggga

SEQ ID NO: 5164 - RNA, 17 nt, Homo sapiens
uucgggaaguucgugca

SEQ ID NO: 5165 - RNA, 17 nt, Homo sapiens
ggaaguucgugcaguac

SEQ ID NO: 5166 - RNA, 17 nt, Homo sapiens
aaguucgugcaguacug

SEQ ID NO: 5167 - RNA, 17 nt, Homo sapiens
uucgugcaguacugccc

SEQ ID NO: 5168 - RNA, 17 nt, Homo sapiens
gcaguacugccccggca

SEQ ID NO: 5169 - RNA, 17 nt, Homo sapiens
cugccccggcaccuggu

SEQ ID NO: 5170 - RNA, 17 nt, Homo sapiens
ggcaccuggugcuuuau

SEQ ID NO: 5171 - RNA, 17 nt, Homo sapiens
caccuggugcuuuaucc

SEQ ID NO: 5172 - RNA, 17 nt, Homo sapiens
uccagaugguccacgag

SEQ ID NO: 5173 - RNA, 17 nt, Homo sapiens
cgaggagggcucgcugu

SEQ ID NO: 5174 - RNA, 17 nt, Homo sapiens
gagggcucgcugucggu

SEQ ID NO: 5175 - RNA, 17 nt, Homo sapiens
ggcucgcugucggugcu

SEQ ID NO: 5176 - RNA, 17 nt, Homo sapiens
cgcugucggugcugggg

SEQ ID NO: 5177 - RNA, 17 nt, Homo sapiens
cugucggugcuggggua

SEQ ID NO: 5178 - RNA, 17 nt, Homo sapiens
gugcugggguacucugu

SEQ ID NO: 5179 - RNA, 17 nt, Homo sapiens
gguacucugugcucuac

SEQ ID NO: 5180 - RNA, 17 nt, Homo sapiens
uacucugugcucuacuc

SEQ ID NO: 5181 - RNA, 17 nt, Homo sapiens
cuacuccagccucaugg

SEQ ID NO: 5182 - RNA, 17 nt, Homo sapiens
gccucauggcgcugcug

SEQ ID NO: 5183 - RNA, 17 nt, Homo sapiens
cucauggcgcugcuggu

SEQ ID NO: 5184 - RNA, 17 nt, Homo sapiens
auggcgcugcugguccu

SEQ ID NO: 5185 - RNA, 17 nt, Homo sapiens
cgcugcugguccucgcc

SEQ ID NO: 5186 - RNA, 17 nt, Homo sapiens
ugguccucgccaccgug

SEQ ID NO: 5187 - RNA, 17 nt, Homo sapiens
ucgccaccgugcugugc

SEQ ID NO: 5188 - RNA, 17 nt, Homo sapiens
gccaccgugcugugcaa

SEQ ID NO: 5189 - RNA, 17 nt, Homo sapiens
accgugcugugcaaccu

SEQ ID NO: 5190 - RNA, 17 nt, Homo sapiens
cgugcugugcaaccucg

SEQ ID NO: 5191 - RNA, 17 nt, Homo sapiens
caaccucggcgccaugc

SEQ ID NO: 5192 - RNA, 17 nt, Homo sapiens
accucggcgccaugcgc

SEQ ID NO: 5193 - RNA, 17 nt, Homo sapiens
ggcgccaugcgcaaccu

SEQ ID NO: 5194 - RNA, 17 nt, Homo sapiens
cgccaugcgcaaccucu

SEQ ID NO: 5195 - RNA, 17 nt, Homo sapiens
accucuaugcgaugcac

SEQ ID NO: 5196 - RNA, 17 nt, Homo sapiens
uaugcgaugcaccggcg

SEQ ID NO: 5197 - RNA, 17 nt, Homo sapiens
augcaccggcggcugca

SEQ ID NO: 5198 - RNA, 17 nt, Homo sapiens
caccggcggcugcagcg

SEQ ID NO: 5199 - RNA, 17 nt, Homo sapiens
cggcggcugcagcggca

SEQ ID NO: 5200 - RNA, 17 nt, Homo sapiens
cggcugcagcggcaccc

SEQ ID NO: 5201 - RNA, 17 nt, Homo sapiens
cugcagcggcacccgcg

SEQ ID NO: 5202 - RNA, 17 nt, Homo sapiens
cggcacccgcgcuccug

SEQ ID NO: 5203 - RNA, 17 nt, Homo sapiens
gcacccgcgcuccugca

SEQ ID NO: 5204 - RNA, 17 nt, Homo sapiens
gcgcuccugcaccaggg

SEQ ID NO: 5205 - RNA, 17 nt, Homo sapiens
cagggacugugccgagc

SEQ ID NO: 5206 - RNA, 17 nt, Homo sapiens
gggacugugccgagccg

SEQ ID NO: 5207 - RNA, 17 nt, Homo sapiens
ugugccgagccgcgcgc

SEQ ID NO: 5208 - RNA, 17 nt, Homo sapiens
gccgagccgcgcgcgga

SEQ ID NO: 5209 - RNA, 17 nt, Homo sapiens
cgagccgcgcgcggacg

SEQ ID NO: 5210 - RNA, 17 nt, Homo sapiens
agccgcgcgcggacggg

SEQ ID NO: 5211 - RNA, 17 nt, Homo sapiens
ggagggaagcguccccu

SEQ ID NO: 5212 - RNA, 17 nt, Homo sapiens
agggaagcguccccuca

SEQ ID NO: 5213 - RNA, 17 nt, Homo sapiens
uccccucagccccugga

SEQ ID NO: 5214 - RNA, 17 nt, Homo sapiens
cuggaggagcuggauca

SEQ ID NO: 5215 - RNA, 17 nt, Homo sapiens
caccuccugcugcuggc

SEQ ID NO: 5216 - RNA, 17 nt, Homo sapiens
cuccugcugcuggcgcu

SEQ ID NO: 5217 - RNA, 17 nt, Homo sapiens
ugcugcuggcgcugaug

SEQ ID NO: 5218 - RNA, 17 nt, Homo sapiens
cugcuggcgcugaugac

SEQ ID NO: 5219 - RNA, 17 nt, Homo sapiens
ugaugaccgugcucuuc

SEQ ID NO: 5220 - RNA, 17 nt, Homo sapiens
augaccgugcucuucac

SEQ ID NO: 5221 - RNA, 17 nt, Homo sapiens
uucacuauguguucucu

SEQ ID NO: 5222 - RNA, 17 nt, Homo sapiens
cacuauguguucucugc

SEQ ID NO: 5223 - RNA, 17 nt, Homo sapiens
uguucucugcccguaau

SEQ ID NO: 5224 - RNA, 17 nt, Homo sapiens
cucugcccguaauuuau

SEQ ID NO: 5225 - RNA, 17 nt, Homo sapiens
aauuuaucgcgcuuacu

SEQ ID NO: 5226 - RNA, 17 nt, Homo sapiens
uuuaucgcgcuuacuau

SEQ ID NO: 5227 - RNA, 17 nt, Homo sapiens
acuauggagcauuuaag

SEQ ID NO: 5228 - RNA, 17 nt, Homo sapiens
uuaaggaugucaaggag

SEQ ID NO: 5229 - RNA, 17 nt, Homo sapiens
cugaagaagcagaagac

SEQ ID NO: 5230 - RNA, 17 nt, Homo sapiens
accuccgagccuugcga

SEQ ID NO: 5231 - RNA, 17 nt, Homo sapiens
cgagccuugcgauuucu

SEQ ID NO: 5232 - RNA, 17 nt, Homo sapiens
uucuaucugugauuuca

SEQ ID NO: 5233 - RNA, 17 nt, Homo sapiens
uuucaauuguggacccu

SEQ ID NO: 5234 - RNA, 17 nt, Homo sapiens
gaucuccaguauuucgg

SEQ ID NO: 5235 - RNA, 17 nt, Homo sapiens
ccucuuagguacaggag

SEQ ID NO: 5236 - RNA, 17 nt, Homo sapiens
guacaggagccggugca

SEQ ID NO: 5237 - RNA, 17 nt, Homo sapiens
aggagccggugcagcaa

SEQ ID NO: 5238 - RNA, 17 nt, Homo sapiens
gagccggugcagcaauu

SEQ ID NO: 5239 - RNA, 17 nt, Homo sapiens
ccggugcagcaauucca

SEQ ID NO: 5240 - RNA, 17 nt, Homo sapiens
ggaauccagucugugac

SEQ ID NO: 5241 - RNA, 17 nt, Homo sapiens
uccagucugugacagug

SEQ ID NO: 5242 - RNA, 17 nt, Homo sapiens
cugugacaguguuuuuc

SEQ ID NO: 5243 - RNA, 17 nt, Homo sapiens
gugacaguguuuuucac

SEQ ID NO: 5244 - RNA, 17 nt, Homo sapiens
uucacucugugguaagc

SEQ ID NO: 5245 - RNA, 17 nt, Homo sapiens
acucugugguaagcuga

SEQ ID NO: 5246 - RNA, 17 nt, Homo sapiens
ugugguaagcugaggaa

SEQ ID NO: 5247 - RNA, 17 nt, Homo sapiens
aggaauaugucacauuu

SEQ ID NO: 5248 - RNA, 17 nt, Homo sapiens
cauuuucagucaaagaa

SEQ ID NO: 5249 - RNA, 17 nt, Homo sapiens
ccguuccgacucggcac

SEQ ID NO: 5250 - RNA, 17 nt, Homo sapiens
uacugagaacgcagcgc

SEQ ID NO: 5251 - RNA, 17 nt, Homo sapiens
gcucuucaaugccagcg

SEQ ID NO: 5252 - RNA, 17 nt, Homo sapiens
ggggugugacccgcgag

SEQ ID NO: 5253 - RNA, 17 nt, Homo sapiens
gaguuuagauaggaggu

SEQ ID NO: 5254 - RNA, 17 nt, Homo sapiens
cguggggaacaccccgc

SEQ ID NO: 5255 - RNA, 17 nt, Homo sapiens
cugccagaacaccaccu

SEQ ID NO: 5256 - RNA, 17 nt, Homo sapiens
aaaaggcaacucggcgg

SEQ ID NO: 5257 - RNA, 17 nt, Homo sapiens
cggcggugaugggcggg

SEQ ID NO: 5258 - RNA, 17 nt, Homo sapiens
ccugggcaaccugcugg

SEQ ID NO: 5259 - RNA, 17 nt, Homo sapiens
guggccugacggucacc

SEQ ID NO: 5260 - RNA, 17 nt, Homo sapiens
ggucaccgacuugcugg

SEQ ID NO: 5261 - RNA, 17 nt, Homo sapiens
cgcucagaaccggaguc

SEQ ID NO: 5262 - RNA, 17 nt, Homo sapiens
cgcauuggacaacucgu

SEQ ID NO: 5263 - RNA, 17 nt, Homo sapiens
auuggacaacucguugu

SEQ ID NO: 5264 - RNA, 17 nt, Homo sapiens
ucuccucgacacugcaa

SEQ ID NO: 5265 - RNA, 17 nt, Homo sapiens
acacugcaacuccuggc

SEQ ID NO: 5266 - RNA, 17 nt, Homo sapiens
uucuaccgacggcacau

SEQ ID NO: 5267 - RNA, 17 nt, Homo sapiens
uuauccagaugguccac

SEQ ID NO: 5268 - RNA, 17 nt, Homo sapiens
gcugugcaaccucggcg

SEQ ID NO: 5269 - RNA, 17 nt, Homo sapiens
caugcgcaaccucuaug

SEQ ID NO: 5270 - RNA, 17 nt, Homo sapiens
ucuaugcgaugcaccgg

SEQ ID NO: 5271 - RNA, 17 nt, Homo sapiens
caccagggacugugccg

SEQ ID NO: 5272 - RNA, 17 nt, Homo sapiens
gcgcgcggacgggaggg

SEQ ID NO: 5273 - RNA, 17 nt, Homo sapiens
ggagcuggaucaccucc

SEQ ID NO: 5274 - RNA, 17 nt, Homo sapiens
uggcgcugaugaccgug

SEQ ID NO: 5275 - RNA, 17 nt, Homo sapiens
cgcugaugaccgugcuc

SEQ ID NO: 5276 - RNA, 17 nt, Homo sapiens
ugcccguaauuuaucgc

SEQ ID NO: 5277 - RNA, 17 nt, Homo sapiens
auuuaaggaugucaagg

SEQ ID NO: 5278 - RNA, 17 nt, Homo sapiens
ggagaaaaacaggaccu

SEQ ID NO: 5279 - RNA, 17 nt, Homo sapiens
aaaacaggaccucugaa

SEQ ID NO: 5280 - RNA, 17 nt, Homo sapiens
agcagaagaccuccgag

SEQ ID NO: 5281 - RNA, 17 nt, Homo sapiens
gccuugcgauuucuauc

SEQ ID NO: 5282 - RNA, 17 nt, Homo sapiens
uaucugugauuucaauu

SEQ ID NO: 5283 - RNA, 17 nt, Homo sapiens
ugauuucaauuguggac

SEQ ID NO: 5284 - RNA, 17 nt, Homo sapiens
aauuguggacccuugga

SEQ ID NO: 5285 - RNA, 17 nt, Homo sapiens
acccuuggauuuuuauc

SEQ ID NO: 5286 - RNA, 17 nt, Homo sapiens
auuuucagaucuccagu

SEQ ID NO: 5287 - RNA, 17 nt, Homo sapiens
uauuucggauauuuuuu

SEQ ID NO: 5288 - RNA, 17 nt, Homo sapiens
uucacaagauuuucauu

SEQ ID NO: 5289 - RNA, 17 nt, Homo sapiens
uucauuagaccucuuag

SEQ ID NO: 5290 - RNA, 17 nt, Homo sapiens
gugcagcaauuccacua

SEQ ID NO: 5291 - RNA, 17 nt, Homo sapiens
uuccacuaacauggaau

SEQ ID NO: 5292 - RNA, 17 nt, Homo sapiens
aacauggaauccagucu

SEQ ID NO: 5293 - RNA, 17 nt, Homo sapiens
agucugugacaguguuu

SEQ ID NO: 5294 - RNA, 17 nt, Homo sapiens
gcugaggaauaugucac

SEQ ID NO: 5295 - RNA, 17 nt, Homo sapiens
gccguuccgacucggca

SEQ ID NO: 5296 - RNA, 17 nt, Homo sapiens
uccgacucggcaccaga

SEQ ID NO: 5297 - RNA, 17 nt, Homo sapiens
cggcaccagagucuguc

SEQ ID NO: 5298 - RNA, 17 nt, Homo sapiens
ucucuacugagaacgca

SEQ ID NO: 5299 - RNA, 17 nt, Homo sapiens
ucuacugagaacgcagc

SEQ ID NO: 5300 - RNA, 17 nt, Homo sapiens
gcgcgucagggccgagc

SEQ ID NO: 5301 - RNA, 17 nt, Homo sapiens
cgcgucagggccgagcu

SEQ ID NO: 5302 - RNA, 17 nt, Homo sapiens
ucagggccgagcucuuc

SEQ ID NO: 5303 - RNA, 17 nt, Homo sapiens
ucuucacuggccugcuc

SEQ ID NO: 5304 - RNA, 17 nt, Homo sapiens
cagcgccaggcgcucac

SEQ ID NO: 5305 - RNA, 17 nt, Homo sapiens
acccugcagagcguccc

SEQ ID NO: 5306 - RNA, 17 nt, Homo sapiens
cucucaaagaggggugu

SEQ ID NO: 5307 - RNA, 17 nt, Homo sapiens
cucaaagagggguguga

SEQ ID NO: 5308 - RNA, 17 nt, Homo sapiens
ucaaagaggggugugac

SEQ ID NO: 5309 - RNA, 17 nt, Homo sapiens
caaagaggggugugacc

SEQ ID NO: 5310 - RNA, 17 nt, Homo sapiens
aggggugugacccgcga

SEQ ID NO: 5311 - RNA, 17 nt, Homo sapiens
ugacccgcgaguuuaga

SEQ ID NO: 5312 - RNA, 17 nt, Homo sapiens
cgaguuuagauaggagg

SEQ ID NO: 5313 - RNA, 17 nt, Homo sapiens
uuuagauaggagguucc

SEQ ID NO: 5314 - RNA, 17 nt, Homo sapiens
uuagauaggagguuccu

SEQ ID NO: 5315 - RNA, 17 nt, Homo sapiens
agauaggagguuccugc

SEQ ID NO: 5316 - RNA, 17 nt, Homo sapiens
ccugccguggggaacac

SEQ ID NO: 5317 - RNA, 17 nt, Homo sapiens
cugccguggggaacacc

SEQ ID NO: 5318 - RNA, 17 nt, Homo sapiens
ugccguggggaacaccc

SEQ ID NO: 5319 - RNA, 17 nt, Homo sapiens
gccguggggaacacccc

SEQ ID NO: 5320 - RNA, 17 nt, Homo sapiens
ccgcccucggagcuuuu

SEQ ID NO: 5321 - RNA, 17 nt, Homo sapiens
cgcccucggagcuuuuu

SEQ ID NO: 5322 - RNA, 17 nt, Homo sapiens
uuuucuguggcgcagcu

SEQ ID NO: 5323 - RNA, 17 nt, Homo sapiens
cuccgcccgagccgcgc

SEQ ID NO: 5324 - RNA, 17 nt, Homo sapiens
ccgcgcgcggagcugcc

SEQ ID NO: 5325 - RNA, 17 nt, Homo sapiens
cgcgcgcggagcugccg

SEQ ID NO: 5326 - RNA, 17 nt, Homo sapiens
gagcugccgggggcucc

SEQ ID NO: 5327 - RNA, 17 nt, Homo sapiens
agcugccgggggcuccu

SEQ ID NO: 5328 - RNA, 17 nt, Homo sapiens
gcugccgggggcuccuu

SEQ ID NO: 5329 - RNA, 17 nt, Homo sapiens
cugccgggggcuccuua

SEQ ID NO: 5330 - RNA, 17 nt, Homo sapiens
uagcacccgggcgccgg

SEQ ID NO: 5331 - RNA, 17 nt, Homo sapiens
agcacccgggcgccggg

SEQ ID NO: 5332 - RNA, 17 nt, Homo sapiens
cgggcgccggggcccuc

SEQ ID NO: 5333 - RNA, 17 nt, Homo sapiens
gggcgccggggcccucg

SEQ ID NO: 5334 - RNA, 17 nt, Homo sapiens
ggcgccggggcccucgc

SEQ ID NO: 5335 - RNA, 17 nt, Homo sapiens
cacgccaugaagucgcc

SEQ ID NO: 5336 - RNA, 17 nt, Homo sapiens
cgcugccagaacaccac

SEQ ID NO: 5337 - RNA, 17 nt, Homo sapiens
accucuguggaaaaagg

SEQ ID NO: 5338 - RNA, 17 nt, Homo sapiens
ccucuguggaaaaaggc

SEQ ID NO: 5339 - RNA, 17 nt, Homo sapiens
uggaaaaaggcaacucg

SEQ ID NO: 5340 - RNA, 17 nt, Homo sapiens
ggcaacucggcggugau

SEQ ID NO: 5341 - RNA, 17 nt, Homo sapiens
aacucggcggugauggg

SEQ ID NO: 5342 - RNA, 17 nt, Homo sapiens
ucggcggugaugggcgg

SEQ ID NO: 5343 - RNA, 17 nt, Homo sapiens
gcggugaugggcggggu

SEQ ID NO: 5344 - RNA, 17 nt, Homo sapiens
cggugaugggcggggug

SEQ ID NO: 5345 - RNA, 17 nt, Homo sapiens
ugaugggcggggugcuc

SEQ ID NO: 5346 - RNA, 17 nt, Homo sapiens
gaugggcggggugcucu

SEQ ID NO: 5347 - RNA, 17 nt, Homo sapiens
augggcggggugcucuu

SEQ ID NO: 5348 - RNA, 17 nt, Homo sapiens
ucagcaccggccuccug

SEQ ID NO: 5349 - RNA, 17 nt, Homo sapiens
ggccuccugggcaaccu

SEQ ID NO: 5350 - RNA, 17 nt, Homo sapiens
gccuccugggcaaccug

SEQ ID NO: 5351 - RNA, 17 nt, Homo sapiens
aaccugcuggcccuggg

SEQ ID NO: 5352 - RNA, 17 nt, Homo sapiens
cuggcccuggggcugcu

SEQ ID NO: 5353 - RNA, 17 nt, Homo sapiens
uggcccuggggcugcug

SEQ ID NO: 5354 - RNA, 17 nt, Homo sapiens
ggcccuggggcugcugg

SEQ ID NO: 5355 - RNA, 17 nt, Homo sapiens
gggcugcuggcgcgcuc

SEQ ID NO: 5356 - RNA, 17 nt, Homo sapiens
gcgcgcucggggcuggg

SEQ ID NO: 5357 - RNA, 17 nt, Homo sapiens
cgcgcucggggcugggg

SEQ ID NO: 5358 - RNA, 17 nt, Homo sapiens
gcgcucggggcuggggu

SEQ ID NO: 5359 - RNA, 17 nt, Homo sapiens
ucggggcugggguggug

SEQ ID NO: 5360 - RNA, 17 nt, Homo sapiens
cggggcugggguggugc

SEQ ID NO: 5361 - RNA, 17 nt, Homo sapiens
ggggcugggguggugcu

SEQ ID NO: 5362 - RNA, 17 nt, Homo sapiens
gcugggguggugcucgc

SEQ ID NO: 5363 - RNA, 17 nt, Homo sapiens
gugcucgcggcguccac

SEQ ID NO: 5364 - RNA, 17 nt, Homo sapiens
cugcccucggucuucua

SEQ ID NO: 5365 - RNA, 17 nt, Homo sapiens
uacaugcuggugugugg

SEQ ID NO: 5366 - RNA, 17 nt, Homo sapiens
ugguguguggccugacg

SEQ ID NO: 5367 - RNA, 17 nt, Homo sapiens
uguggccugacggucac

SEQ ID NO: 5368 - RNA, 17 nt, Homo sapiens
ggccugacggucaccga

SEQ ID NO: 5369 - RNA, 17 nt, Homo sapiens
cggucaccgacuugcug

SEQ ID NO: 5370 - RNA, 17 nt, Homo sapiens
gacuugcugggcaagug

SEQ ID NO: 5371 - RNA, 17 nt, Homo sapiens
acuugcugggcaagugc

SEQ ID NO: 5372 - RNA, 17 nt, Homo sapiens
cuaagcccgguggugcu

SEQ ID NO: 5373 - RNA, 17 nt, Homo sapiens
agcccgguggugcuggc

SEQ ID NO: 5374 - RNA, 17 nt, Homo sapiens
guggugcuggcugccua

SEQ ID NO: 5375 - RNA, 17 nt, Homo sapiens
uacgcucagaaccggag

SEQ ID NO: 5376 - RNA, 17 nt, Homo sapiens
ucagaaccggagucugc

SEQ ID NO: 5377 - RNA, 17 nt, Homo sapiens
cagaaccggagucugcg

SEQ ID NO: 5378 - RNA, 17 nt, Homo sapiens
gagucugcgggugcuug

SEQ ID NO: 5379 - RNA, 17 nt, Homo sapiens
agucugcgggugcuugc

SEQ ID NO: 5380 - RNA, 17 nt, Homo sapiens
cccgcauuggacaacuc

SEQ ID NO: 5381 - RNA, 17 nt, Homo sapiens
ccgcauuggacaacucg

SEQ ID NO: 5382 - RNA, 17 nt, Homo sapiens
ccuucuuugggcucucc

SEQ ID NO: 5383 - RNA, 17 nt, Homo sapiens
cuucuuugggcucuccu

SEQ ID NO: 5384 - RNA, 17 nt, Homo sapiens
cucuccucgacacugca

SEQ ID NO: 5385 - RNA, 17 nt, Homo sapiens
caacuccuggccauggc

SEQ ID NO: 5386 - RNA, 17 nt, Homo sapiens
cuggccauggcacugga

SEQ ID NO: 5387 - RNA, 17 nt, Homo sapiens
auggcacuggagugcug

SEQ ID NO: 5388 - RNA, 17 nt, Homo sapiens
uggcacuggagugcugg

SEQ ID NO: 5389 - RNA, 17 nt, Homo sapiens
ggagugcuggcucuccc

SEQ ID NO: 5390 - RNA, 17 nt, Homo sapiens
ucucccuagggcacccu

SEQ ID NO: 5391 - RNA, 17 nt, Homo sapiens
cucccuagggcacccuu

SEQ ID NO: 5392 - RNA, 17 nt, Homo sapiens
cuucuaccgacggcaca

SEQ ID NO: 5393 - RNA, 17 nt, Homo sapiens
cuaccgacggcacauca

SEQ ID NO: 5394 - RNA, 17 nt, Homo sapiens
cugcgccugggcgcacu

SEQ ID NO: 5395 - RNA, 17 nt, Homo sapiens
ugcgccugggcgcacug

SEQ ID NO: 5396 - RNA, 17 nt, Homo sapiens
ggcgcacugguggcccc

SEQ ID NO: 5397 - RNA, 17 nt, Homo sapiens
gcacugguggccccggu

SEQ ID NO: 5398 - RNA, 17 nt, Homo sapiens
guggccccgguggugag

SEQ ID NO: 5399 - RNA, 17 nt, Homo sapiens
gccccgguggugagcgc

SEQ ID NO: 5400 - RNA, 17 nt, Homo sapiens
ccgguggugagcgccuu

SEQ ID NO: 5401 - RNA, 17 nt, Homo sapiens
uucucccuggcuuucug

SEQ ID NO: 5402 - RNA, 17 nt, Homo sapiens
ccuuucaugggcuucgg

SEQ ID NO: 5403 - RNA, 17 nt, Homo sapiens
cuuucaugggcuucggg

SEQ ID NO: 5404 - RNA, 17 nt, Homo sapiens
ugggcuucgggaaguuc

SEQ ID NO: 5405 - RNA, 17 nt, Homo sapiens
gggcuucgggaaguucg

SEQ ID NO: 5406 - RNA, 17 nt, Homo sapiens
ggcuucgggaaguucgu

SEQ ID NO: 5407 - RNA, 17 nt, Homo sapiens
acugccccggcaccugg

SEQ ID NO: 5408 - RNA, 17 nt, Homo sapiens
cggcaccuggugcuuua

SEQ ID NO: 5409 - RNA, 17 nt, Homo sapiens
uuuauccagauggucca

SEQ ID NO: 5410 - RNA, 17 nt, Homo sapiens
auccagaugguccacga

SEQ ID NO: 5411 - RNA, 17 nt, Homo sapiens
ugguccacgaggagggc

SEQ ID NO: 5412 - RNA, 17 nt, Homo sapiens
guccacgaggagggcuc

SEQ ID NO: 5413 - RNA, 17 nt, Homo sapiens
uccacgaggagggcucg

SEQ ID NO: 5414 - RNA, 17 nt, Homo sapiens
cacgaggagggcucgcu

SEQ ID NO: 5415 - RNA, 17 nt, Homo sapiens
acgaggagggcucgcug

SEQ ID NO: 5416 - RNA, 17 nt, Homo sapiens
ucgcugucggugcuggg

SEQ ID NO: 5417 - RNA, 17 nt, Homo sapiens
ucggugcugggguacuc

SEQ ID NO: 5418 - RNA, 17 nt, Homo sapiens
cggugcugggguacucu

SEQ ID NO: 5419 - RNA, 17 nt, Homo sapiens
ggugcugggguacucug

SEQ ID NO: 5420 - RNA, 17 nt, Homo sapiens
agccucauggcgcugcu

SEQ ID NO: 5421 - RNA, 17 nt, Homo sapiens
gcgcugcugguccucgc

SEQ ID NO: 5422 - RNA, 17 nt, Homo sapiens
gcaaccucggcgccaug

SEQ ID NO: 5423 - RNA, 17 nt, Homo sapiens
cucuaugcgaugcaccg

SEQ ID NO: 5424 - RNA, 17 nt, Homo sapiens
gaugcaccggcggcugc

SEQ ID NO: 5425 - RNA, 17 nt, Homo sapiens
gcaccggcggcugcagc

SEQ ID NO: 5426 - RNA, 17 nt, Homo sapiens
gcugcagcggcacccgc

SEQ ID NO: 5427 - RNA, 17 nt, Homo sapiens
cugcaccagggacugug

SEQ ID NO: 5428 - RNA, 17 nt, Homo sapiens
ugcaccagggacugugc

SEQ ID NO: 5429 - RNA, 17 nt, Homo sapiens
gcaccagggacugugcc

SEQ ID NO: 5430 - RNA, 17 nt, Homo sapiens
acugugccgagccgcgc

SEQ ID NO: 5431 - RNA, 17 nt, Homo sapiens
ccgcgcgcggacgggag

SEQ ID NO: 5432 - RNA, 17 nt, Homo sapiens
cgcgcgcggacgggagg

SEQ ID NO: 5433 - RNA, 17 nt, Homo sapiens
gcgcggacgggagggaa

SEQ ID NO: 5434 - RNA, 17 nt, Homo sapiens
cgcggacgggagggaag

SEQ ID NO: 5435 - RNA, 17 nt, Homo sapiens
gcggacgggagggaagc

SEQ ID NO: 5436 - RNA, 17 nt, Homo sapiens
ggacgggagggaagcgu

SEQ ID NO: 5437 - RNA, 17 nt, Homo sapiens
gacgggagggaagcguc

SEQ ID NO: 5438 - RNA, 17 nt, Homo sapiens
acgggagggaagcgucc

SEQ ID NO: 5439 - RNA, 17 nt, Homo sapiens
cagccccuggaggagcu

SEQ ID NO: 5440 - RNA, 17 nt, Homo sapiens
agccccuggaggagcug

SEQ ID NO: 5441 - RNA, 17 nt, Homo sapiens
ccccuggaggagcugga

SEQ ID NO: 5442 - RNA, 17 nt, Homo sapiens
cccuggaggagcuggau

SEQ ID NO: 5443 - RNA, 17 nt, Homo sapiens
gaggagcuggaucaccu

SEQ ID NO: 5444 - RNA, 17 nt, Homo sapiens
aggagcuggaucaccuc

SEQ ID NO: 5445 - RNA, 17 nt, Homo sapiens
cugcugcuggcgcugau

SEQ ID NO: 5446 - RNA, 17 nt, Homo sapiens
cuggcgcugaugaccgu

SEQ ID NO: 5447 - RNA, 17 nt, Homo sapiens
gcgcugaugaccgugcu

SEQ ID NO: 5448 - RNA, 17 nt, Homo sapiens
cuuacuauggagcauuu

SEQ ID NO: 5449 - RNA, 17 nt, Homo sapiens
uuacuauggagcauuua

SEQ ID NO: 5450 - RNA, 17 nt, Homo sapiens
gcauuuaaggaugucaa

SEQ ID NO: 5451 - RNA, 17 nt, Homo sapiens
cauuuaaggaugucaag

SEQ ID NO: 5452 - RNA, 17 nt, Homo sapiens
gaugucaaggagaaaaa

SEQ ID NO: 5453 - RNA, 17 nt, Homo sapiens
augucaaggagaaaaac

SEQ ID NO: 5454 - RNA, 17 nt, Homo sapiens
gucaaggagaaaaacag

SEQ ID NO: 5455 - RNA, 17 nt, Homo sapiens
gaaaaacaggaccucug

SEQ ID NO: 5456 - RNA, 17 nt, Homo sapiens
aaaaacaggaccucuga

SEQ ID NO: 5457 - RNA, 17 nt, Homo sapiens
ggaccucugaagaagca

SEQ ID NO: 5458 - RNA, 17 nt, Homo sapiens
ccucugaagaagcagaa

SEQ ID NO: 5459 - RNA, 17 nt, Homo sapiens
aagaagcagaagaccuc

SEQ ID NO: 5460 - RNA, 17 nt, Homo sapiens
aagcagaagaccuccga

SEQ ID NO: 5461 - RNA, 17 nt, Homo sapiens
agaccuccgagccuugc

SEQ ID NO: 5462 - RNA, 17 nt, Homo sapiens
agccuugcgauuucuau

SEQ ID NO: 5463 - RNA, 17 nt, Homo sapiens
cuaucugugauuucaau

SEQ ID NO: 5464 - RNA, 17 nt, Homo sapiens
ucaauuguggacccuug

SEQ ID NO: 5465 - RNA, 17 nt, Homo sapiens
caauuguggacccuugg

SEQ ID NO: 5466 - RNA, 17 nt, Homo sapiens
ggacccuuggauuuuua

SEQ ID NO: 5467 - RNA, 17 nt, Homo sapiens
gacccuuggauuuuuau

SEQ ID NO: 5468 - RNA, 17 nt, Homo sapiens
cauuuucagaucuccag

SEQ ID NO: 5469 - RNA, 17 nt, Homo sapiens
aguauuucggauauuuu

SEQ ID NO: 5470 - RNA, 17 nt, Homo sapiens
guauuucggauauuuuu

SEQ ID NO: 5471 - RNA, 17 nt, Homo sapiens
uuucacaagauuuucau

SEQ ID NO: 5472 - RNA, 17 nt, Homo sapiens
uuucauuagaccucuua

SEQ ID NO: 5473 - RNA, 17 nt, Homo sapiens
accucuuagguacagga

SEQ ID NO: 5474 - RNA, 17 nt, Homo sapiens
uagguacaggagccggu

SEQ ID NO: 5475 - RNA, 17 nt, Homo sapiens
agguacaggagccggug

SEQ ID NO: 5476 - RNA, 17 nt, Homo sapiens
caggagccggugcagca

SEQ ID NO: 5477 - RNA, 17 nt, Homo sapiens
acuaacauggaauccag

SEQ ID NO: 5478 - RNA, 17 nt, Homo sapiens
cuaacauggaauccagu

SEQ ID NO: 5479 - RNA, 17 nt, Homo sapiens
cagucugugacaguguu

SEQ ID NO: 5480 - RNA, 17 nt, Homo sapiens
cacucugugguaagcug

SEQ ID NO: 5481 - RNA, 17 nt, Homo sapiens
gguaagcugaggaauau

SEQ ID NO: 5482 - RNA, 17 nt, Homo sapiens
uaagcugaggaauaugu

SEQ ID NO: 5483 - RNA, 17 nt, Homo sapiens
aagcugaggaauauguc

SEQ ID NO: 5484 - RNA, 38 nt, Artificial Sequence
  Description of Artificial Sequence:  Enzymatic Nucleic Acid
cuucaucgcugaugaggccguuaggccgaaagggguug

SEQ ID NO: 5485 - RNA, 38 nt, Artificial Sequence
  Description of Artificial Sequence:  Enzymatic Nucleic Acid
cuccagcgcugaugaggccguuaggccgaaacgcccuc

SEQ ID NO: 5486 - RNA, 38 nt, Artificial Sequence
  Description of Artificial Sequence:  Enzymatic Nucleic Acid
uuguagcacugaugaggccguuaggccgaaacgcaggc

SEQ ID NO: 5487 - RNA, 38 nt, Artificial Sequence
  Description of Artificial Sequence:  Enzymatic Nucleic Acid
gcucauugcugaugaggccguuaggccgaaagcauacg

SEQ ID NO: 5488 - RNA, 38 nt, Artificial Sequence
  Description of Artificial Sequence:  Enzymatic Nucleic Acid
gcagcaggcugaugaggccguuaggccgaaaugcccac

SEQ ID NO: 5489 - RNA, 38 nt, Artificial Sequence
  Description of Artificial Sequence:  Enzymatic Nucleic Acid
ugcaggaacugaugaggccguuaggccgaaaugcgcug

SEQ ID NO: 5490 - RNA, 38 nt, Artificial Sequence
  Description of Artificial Sequence:  Enzymatic Nucleic Acid
cgugcaggcugaugaggccguuaggccgaaagaugcgc

SEQ ID NO: 5491 - RNA, 38 nt, Artificial Sequence
  Description of Artificial Sequence:  Enzymatic Nucleic Acid
ccgugcagcugaugaggccguuaggccgaaaagaugcg

SEQ ID NO: 5492 - RNA, 38 nt, Artificial Sequence
  Description of Artificial Sequence:  Enzymatic Nucleic Acid
acaugcgacugaugaggccguuaggccgaaaugcgguu

SEQ ID NO: 5493 - RNA, 38 nt, Artificial Sequence
  Description of Artificial Sequence:  Enzymatic Nucleic Acid
gcacaugccugaugaggccguuaggccgaaagaugcgg

SEQ ID NO: 5494 - RNA, 38 nt, Artificial Sequence
  Description of Artificial Sequence:  Enzymatic Nucleic Acid
aggcacggcugaugaggccguuaggccgaaagcuggca

SEQ ID NO: 5495 - RNA, 38 nt, Artificial Sequence
  Description of Artificial Sequence:  Enzymatic Nucleic Acid
caggcacgcugaugaggccguuaggccgaaaagcuggc

SEQ ID NO: 5496 - RNA, 38 nt, Artificial Sequence
  Description of Artificial Sequence:  Enzymatic Nucleic Acid
aggauggucugaugaggccguuaggccgaaagguugcg

SEQ ID NO: 5497 - RNA, 38 nt, Artificial Sequence
  Description of Artificial Sequence:  Enzymatic Nucleic Acid
agccacagcugaugaggccguuaggccgaaauggugag

SEQ ID NO: 5498 - RNA, 38 nt, Artificial Sequence
  Description of Artificial Sequence:  Enzymatic Nucleic Acid
gcacauuccugaugaggccguuaggccgaaagugcagc

SEQ ID NO: 5499 - RNA, 38 nt, Artificial Sequence
  Description of Artificial Sequence:  Enzymatic Nucleic Acid
gccgcauccugaugaggccguuaggccgaaauucgggc

SEQ ID NO: 5500 - RNA, 38 nt, Artificial Sequence
  Description of Artificial Sequence:  Enzymatic Nucleic Acid
ggccagugcugaugaggccguuaggccgaaaggcagcc

SEQ ID NO: 5501 - RNA, 38 nt, Artificial Sequence
  Description of Artificial Sequence:  Enzymatic Nucleic Acid
aggccagucugaugaggccguuaggccgaaaaggcagc

SEQ ID NO: 5502 - RNA, 38 nt, Artificial Sequence
  Description of Artificial Sequence:  Enzymatic Nucleic Acid
ugcuccagcugaugaggccguuaggccgaaagggccag

SEQ ID NO: 5503 - RNA, 38 nt, Artificial Sequence
  Description of Artificial Sequence:  Enzymatic Nucleic Acid
uuaucgcucugaugaggccguuaggccgaaagguccag

SEQ ID NO: 5504 - RNA, 38 nt, Artificial Sequence
  Description of Artificial Sequence:  Enzymatic Nucleic Acid
cugugcaucugaugaggccguuaggccgaaaucgcuga

SEQ ID NO: 5505 - RNA, 38 nt, Artificial Sequence
  Description of Artificial Sequence:  Enzymatic Nucleic Acid
acagaccgcugaugaggccguuaggccgaaagcugugc

SEQ ID NO: 5506 - RNA, 38 nt, Artificial Sequence
  Description of Artificial Sequence:  Enzymatic Nucleic Acid
gguccacacugaugaggccguuaggccgaaaccggagc

SEQ ID NO: 5507 - RNA, 38 nt, Artificial Sequence
  Description of Artificial Sequence:  Enzymatic Nucleic Acid
ggccguggcugaugaggccguuaggccgaaauguggca

SEQ ID NO: 5508 - RNA, 38 nt, Artificial Sequence
  Description of Artificial Sequence:  Enzymatic Nucleic Acid
aggccgugcugaugaggccguuaggccgaaaauguggc

SEQ ID NO: 5509 - RNA, 38 nt, Artificial Sequence
  Description of Artificial Sequence:  Enzymatic Nucleic Acid
agcgugugcugaugaggccguuaggccgaaaggcggcc

SEQ ID NO: 5510 - RNA, 38 nt, Artificial Sequence
  Description of Artificial Sequence:  Enzymatic Nucleic Acid
ggccgcggcugaugaggccguuaggccgaaacagcccc

SEQ ID NO: 5511 - RNA, 38 nt, Artificial Sequence
  Description of Artificial Sequence:  Enzymatic Nucleic Acid
aggccgcgcugaugaggccguuaggccgaaaacagccc

SEQ ID NO: 5512 - RNA, 38 nt, Artificial Sequence
  Description of Artificial Sequence:  Enzymatic Nucleic Acid
gguagaggcugaugaggccguuaggccgaaacugcagg

SEQ ID NO: 5513 - RNA, 38 nt, Artificial Sequence
  Description of Artificial Sequence:  Enzymatic Nucleic Acid
ugcagguacugaugaggccguuaggccgaaagguacug

SEQ ID NO: 5514 - RNA, 38 nt, Artificial Sequence
  Description of Artificial Sequence:  Enzymatic Nucleic Acid
ccugcaggcugaugaggccguuaggccgaaagagguac

SEQ ID NO: 5515 - RNA, 38 nt, Artificial Sequence
  Description of Artificial Sequence:  Enzymatic Nucleic Acid
ggucgcggcugaugaggccguuaggccgaaagguguca

SEQ ID NO: 5516 - RNA, 38 nt, Artificial Sequence
  Description of Artificial Sequence:  Enzymatic Nucleic Acid
aggucgcgcugaugaggccguuaggccgaaaagguguc

SEQ ID NO: 5517 - RNA, 38 nt, Artificial Sequence
  Description of Artificial Sequence:  Enzymatic Nucleic Acid
aggugugucugaugaggccguuaggccgaaagguugcc

SEQ ID NO: 5518 - RNA, 38 nt, Artificial Sequence
  Description of Artificial Sequence:  Enzymatic Nucleic Acid
ugcaggaacugaugaggccguuaggccgaaaggugugu

SEQ ID NO: 5519 - RNA, 38 nt, Artificial Sequence
  Description of Artificial Sequence:  Enzymatic Nucleic Acid
cgugcaggcugaugaggccguuaggccgaaagaggugu

SEQ ID NO: 5520 - RNA, 38 nt, Artificial Sequence
  Description of Artificial Sequence:  Enzymatic Nucleic Acid
ccgugcagcugaugaggccguuaggccgaaaagaggug

SEQ ID NO: 5521 - RNA, 38 nt, Artificial Sequence
  Description of Artificial Sequence:  Enzymatic Nucleic Acid
acgcuggacugaugaggccguuaggccgaaaugcgguu

SEQ ID NO: 5522 - RNA, 38 nt, Artificial Sequence
  Description of Artificial Sequence:  Enzymatic Nucleic Acid
gcacgcugcugaugaggccguuaggccgaaagaugcgg

SEQ ID NO: 5523 - RNA, 38 nt, Artificial Sequence
  Description of Artificial Sequence:  Enzymatic Nucleic Acid
gcccacggcugaugaggccguuaggccgaaaggcgcgc

SEQ ID NO: 5524 - RNA, 38 nt, Artificial Sequence
  Description of Artificial Sequence:  Enzymatic Nucleic Acid
agcccacgcugaugaggccguuaggccgaaaaggcgcg

SEQ ID NO: 5525 - RNA, 38 nt, Artificial Sequence
  Description of Artificial Sequence:  Enzymatic Nucleic Acid
agacgguccugaugaggccguuaggccgaaaggcugug

SEQ ID NO: 5526 - RNA, 38 nt, Artificial Sequence
  Description of Artificial Sequence:  Enzymatic Nucleic Acid
caguaggacugaugaggccguuaggccgaaacggucga

SEQ ID NO: 5527 - RNA, 38 nt, Artificial Sequence
  Description of Artificial Sequence:  Enzymatic Nucleic Acid
ugcaguagcugaugaggccguuaggccgaaagacgguc

SEQ ID NO: 5528 - RNA, 38 nt, Artificial Sequence
  Description of Artificial Sequence:  Enzymatic Nucleic Acid
uggugcagcugaugaggccguuaggccgaaaggagacg

SEQ ID NO: 5529 - RNA, 38 nt, Artificial Sequence
  Description of Artificial Sequence:  Enzymatic Nucleic Acid
ggucacggcugaugaggccguuaggccgaaaggcaugc

SEQ ID NO: 5530 - RNA, 38 nt, Artificial Sequence
  Description of Artificial Sequence:  Enzymatic Nucleic Acid
aggucacgcugaugaggccguuaggccgaaaaggcaug

SEQ ID NO: 5531 - RNA, 38 nt, Artificial Sequence
  Description of Artificial Sequence:  Enzymatic Nucleic Acid
aggcggcccugaugaggccguuaggccgaaaggucacg

SEQ ID NO: 5532 - RNA, 38 nt, Artificial Sequence
  Description of Artificial Sequence:  Enzymatic Nucleic Acid
agugucaucugaugaggccguuaggccgaaaggcggcc

SEQ ID NO: 5533 - RNA, 38 nt, Artificial Sequence
  Description of Artificial Sequence:  Enzymatic Nucleic Acid
aacagauacugaugaggccguuaggccgaaagugucau

SEQ ID NO: 5534 - RNA, 38 nt, Artificial Sequence
  Description of Artificial Sequence:  Enzymatic Nucleic Acid
caaacagacugaugaggccguuaggccgaaagaguguc

SEQ ID NO: 5535 - RNA, 38 nt, Artificial Sequence
  Description of Artificial Sequence:  Enzymatic Nucleic Acid
ggcaaacacugaugaggccguuaggccgaaauagagug

SEQ ID NO: 5536 - RNA, 38 nt, Artificial Sequence
  Description of Artificial Sequence:  Enzymatic Nucleic Acid
uguuggcacugaugaggccguuaggccgaaacagauag

SEQ ID NO: 5537 - RNA, 38 nt, Artificial Sequence
  Description of Artificial Sequence:  Enzymatic Nucleic Acid
uuguuggccugaugaggccguuaggccgaaaacagaua

SEQ ID NO: 5538 - RNA, 38 nt, Artificial Sequence
  Description of Artificial Sequence:  Enzymatic Nucleic Acid
cgcugauacugaugaggccguuaggccgaaauuguugg

SEQ ID NO: 5539 - RNA, 38 nt, Artificial Sequence
  Description of Artificial Sequence:  Enzymatic Nucleic Acid
agcgcugacugaugaggccguuaggccgaaagauuguu

SEQ ID NO: 5540 - RNA, 38 nt, Artificial Sequence
  Description of Artificial Sequence:  Enzymatic Nucleic Acid
gcagcgcucugaugaggccguuaggccgaaauagauug

SEQ ID NO: 5541 - RNA, 38 nt, Artificial Sequence
  Description of Artificial Sequence:  Enzymatic Nucleic Acid
gccucaggcugaugaggccguuaggccgaaacugcagg

SEQ ID NO: 5542 - RNA, 38 nt, Artificial Sequence
  Description of Artificial Sequence:  Enzymatic Nucleic Acid
uugucguucugaugaggccguuaggccgaaagccucag

SEQ ID NO: 5543 - RNA, 38 nt, Artificial Sequence
  Description of Artificial Sequence:  Enzymatic Nucleic Acid
caggcccacugaugaggccguuaggccgaaagugggcg

SEQ ID NO: 5544 - RNA, 38 nt, Artificial Sequence
  Description of Artificial Sequence:  Enzymatic Nucleic Acid
agccgcggcugaugaggccguuaggccgaaacuucugc

SEQ ID NO: 5545 - RNA, 38 nt, Artificial Sequence
  Description of Artificial Sequence:  Enzymatic Nucleic Acid
gagccgcgcugaugaggccguuaggccgaaaacuucug

SEQ ID NO: 5546 - RNA, 38 nt, Artificial Sequence
  Description of Artificial Sequence:  Enzymatic Nucleic Acid
cggaggagcugaugaggccguuaggccgaaagccgcgg

SEQ ID NO: 5547 - RNA, 38 nt, Artificial Sequence
  Description of Artificial Sequence:  Enzymatic Nucleic Acid
ccucggagcugaugaggccguuaggccgaaaggagccg

SEQ ID NO: 5548 - RNA, 38 nt, Artificial Sequence
  Description of Artificial Sequence:  Enzymatic Nucleic Acid
gcaccucgcugaugaggccguuaggccgaaaggaggag

SEQ ID NO: 5549 - RNA, 38 nt, Artificial Sequence
  Description of Artificial Sequence:  Enzymatic Nucleic Acid
cguugcggcugaugaggccguuaggccgaaaggcugca

SEQ ID NO: 5550 - RNA, 38 nt, Artificial Sequence
  Description of Artificial Sequence:  Enzymatic Nucleic Acid
aggcguuucugaugaggccguuaggccgaaaggucacg

SEQ ID NO: 5551 - RNA, 38 nt, Artificial Sequence
  Description of Artificial Sequence:  Enzymatic Nucleic Acid
uuggcagccugaugaggccguuaggccgaaaggcguuu

SEQ ID NO: 5552 - RNA, 38 nt, Artificial Sequence
  Description of Artificial Sequence:  Enzymatic Nucleic Acid
gggauggucugaugaggccguuaggccgaaagggccgg

SEQ ID NO: 5553 - RNA, 38 nt, Artificial Sequence
  Description of Artificial Sequence:  Enzymatic Nucleic Acid
ugggauggcugaugaggccguuaggccgaaaagggccg

SEQ ID NO: 5554 - RNA, 38 nt, Artificial Sequence
  Description of Artificial Sequence:  Enzymatic Nucleic Acid
ccagauggcugaugaggccguuaggccgaaaugguaag

SEQ ID NO: 5555 - RNA, 38 nt, Artificial Sequence
  Description of Artificial Sequence:  Enzymatic Nucleic Acid
ccgguccacugaugaggccguuaggccgaaaugggaug

SEQ ID NO: 5556 - RNA, 38 nt, Artificial Sequence
  Description of Artificial Sequence:  Enzymatic Nucleic Acid
cacuugggcugaugaggccguuaggccgaaagccccag

SEQ ID NO: 5557 - RNA, 38 nt, Artificial Sequence
  Description of Artificial Sequence:  Enzymatic Nucleic Acid
gcacuuggcugaugaggccguuaggccgaaaagcccca

SEQ ID NO: 5558 - RNA, 38 nt, Artificial Sequence
  Description of Artificial Sequence:  Enzymatic Nucleic Acid
ccaguacucugaugaggccguuaggccgaaaggccuug

SEQ ID NO: 5559 - RNA, 38 nt, Artificial Sequence
  Description of Artificial Sequence:  Enzymatic Nucleic Acid
ggcuccagcugaugaggccguuaggccgaaacugaggc

SEQ ID NO: 5560 - RNA, 38 nt, Artificial Sequence
  Description of Artificial Sequence:  Enzymatic Nucleic Acid
gccugccgcugaugaggccguuaggccgaaagcugguc

SEQ ID NO: 5561 - RNA, 38 nt, Artificial Sequence
  Description of Artificial Sequence:  Enzymatic Nucleic Acid
ugccugcccugaugaggccguuaggccgaaaagcuggu

SEQ ID NO: 5562 - RNA, 38 nt, Artificial Sequence
  Description of Artificial Sequence:  Enzymatic Nucleic Acid
gugggccacugaugaggccguuaggccgaaagccguug

SEQ ID NO: 5563 - RNA, 38 nt, Artificial Sequence
  Description of Artificial Sequence:  Enzymatic Nucleic Acid
gagucauucugaugaggccguuaggccgaaaugugccg

SEQ ID NO: 5564 - RNA, 38 nt, Artificial Sequence
  Description of Artificial Sequence:  Enzymatic Nucleic Acid
caaagggucugaugaggccguuaggccgaaagucauug

SEQ ID NO: 5565 - RNA, 38 nt, Artificial Sequence
  Description of Artificial Sequence:  Enzymatic Nucleic Acid
gagucccacugaugaggccguuaggccgaaagggugag

SEQ ID NO: 5566 - RNA, 38 nt, Artificial Sequence
  Description of Artificial Sequence:  Enzymatic Nucleic Acid
agaguccccugaugaggccguuaggccgaaaaggguga

SEQ ID NO: 5567 - RNA, 38 nt, Artificial Sequence
  Description of Artificial Sequence:  Enzymatic Nucleic Acid
gccaggcacugaugaggccguuaggccgaaagucccaa

SEQ ID NO: 5568 - RNA, 38 nt, Artificial Sequence
  Description of Artificial Sequence:  Enzymatic Nucleic Acid
gcucagcacugaugaggccguuaggccgaaagccaggc

SEQ ID NO: 5569 - RNA, 38 nt, Artificial Sequence
  Description of Artificial Sequence:  Enzymatic Nucleic Acid
acugcagucugaugaggccguuaggccgaaagcggggg

SEQ ID NO: 5570 - RNA, 38 nt, Artificial Sequence
  Description of Artificial Sequence:  Enzymatic Nucleic Acid
guggcucgcugaugaggccguuaggccgaaagcccucg

SEQ ID NO: 5571 - RNA, 38 nt, Artificial Sequence
  Description of Artificial Sequence:  Enzymatic Nucleic Acid
agguggggcugaugaggccguuaggccgaaacccuggu

SEQ ID NO: 5572 - RNA, 38 nt, Artificial Sequence
  Description of Artificial Sequence:  Enzymatic Nucleic Acid
gaggugggcugaugaggccguuaggccgaaaacccugg

SEQ ID NO: 5573 - RNA, 38 nt, Artificial Sequence
  Description of Artificial Sequence:  Enzymatic Nucleic Acid
gagggccccugaugaggccguuaggccgaaaggugggg

SEQ ID NO: 5574 - RNA, 38 nt, Artificial Sequence
  Description of Artificial Sequence:  Enzymatic Nucleic Acid
ccuccggccugaugaggccguuaggccgaaagggcccg

SEQ ID NO: 5575 - RNA, 38 nt, Artificial Sequence
  Description of Artificial Sequence:  Enzymatic Nucleic Acid
cuugcgugcugaugaggccguuaggccgaaacagccug

SEQ ID NO: 5576 - RNA, 38 nt, Artificial Sequence
  Description of Artificial Sequence:  Enzymatic Nucleic Acid
ucuugcgucugaugaggccguuaggccgaaaacagccu

SEQ ID NO: 5577 - RNA, 38 nt, Artificial Sequence
  Description of Artificial Sequence:  Enzymatic Nucleic Acid
cuggcccacugaugaggccguuaggccgaaacggcagu

SEQ ID NO: 5578 - RNA, 38 nt, Artificial Sequence
  Description of Artificial Sequence:  Enzymatic Nucleic Acid
agccuucucugaugaggccguuaggccgaaagucacca

SEQ ID NO: 5579 - RNA, 38 nt, Artificial Sequence
  Description of Artificial Sequence:  Enzymatic Nucleic Acid
gggcaccucugaugaggccguuaggccgaaagccuucu

SEQ ID NO: 5580 - RNA, 38 nt, Artificial Sequence
  Description of Artificial Sequence:  Enzymatic Nucleic Acid
aggcugggcugaugaggccguuaggccgaaagggcacc

SEQ ID NO: 5581 - RNA, 38 nt, Artificial Sequence
  Description of Artificial Sequence:  Enzymatic Nucleic Acid
cugcaggucugaugaggccguuaggccgaaaggcuggg

SEQ ID NO: 5582 - RNA, 38 nt, Artificial Sequence
  Description of Artificial Sequence:  Enzymatic Nucleic Acid
aggggggucugaugaggccguuaggccgaaaggcugca

SEQ ID NO: 5583 - RNA, 38 nt, Artificial Sequence
  Description of Artificial Sequence:  Enzymatic Nucleic Acid
cagggccccugaugaggccguuaggccgaaagcacugu

SEQ ID NO: 5584 - RNA, 38 nt, Artificial Sequence
  Description of Artificial Sequence:  Enzymatic Nucleic Acid
uucaucgucugaugaggccguuaggccgaawggguugg

SEQ ID NO: 5585 - RNA, 38 nt, Artificial Sequence
  Description of Artificial Sequence:  Enzymatic Nucleic Acid
ccuccagccugaugaggccguuaggccgaawacgcccu

SEQ ID NO: 5586 - RNA, 38 nt, Artificial Sequence
  Description of Artificial Sequence:  Enzymatic Nucleic Acid
cucccucccugaugaggccguuaggccgaawcggacgc

SEQ ID NO: 5587 - RNA, 38 nt, Artificial Sequence
  Description of Artificial Sequence:  Enzymatic Nucleic Acid
cagcagcccugaugaggccguuaggccgaawcucccuc

SEQ ID NO: 5588 - RNA, 38 nt, Artificial Sequence
  Description of Artificial Sequence:  Enzymatic Nucleic Acid
augccagccugaugaggccguuaggccgaawccggcuc

SEQ ID NO: 5589 - RNA, 38 nt, Artificial Sequence
  Description of Artificial Sequence:  Enzymatic Nucleic Acid
cccaugcccugaugaggccguuaggccgaawcagccgg

SEQ ID NO: 5590 - RNA, 38 nt, Artificial Sequence
  Description of Artificial Sequence:  Enzymatic Nucleic Acid
agcacccacugaugaggccguuaggccgaawccagcag

SEQ ID NO: 5591 - RNA, 38 nt, Artificial Sequence
  Description of Artificial Sequence:  Enzymatic Nucleic Acid
gcagccaccugaugaggccguuaggccgaawcacccau

SEQ ID NO: 5592 - RNA, 38 nt, Artificial Sequence
  Description of Artificial Sequence:  Enzymatic Nucleic Acid
aggccugccugaugaggccguuaggccgaawccacagc

SEQ ID NO: 5593 - RNA, 38 nt, Artificial Sequence
  Description of Artificial Sequence:  Enzymatic Nucleic Acid
gccaggcccugaugaggccguuaggccgaawcagccac

SEQ ID NO: 5594 - RNA, 38 nt, Artificial Sequence
  Description of Artificial Sequence:  Enzymatic Nucleic Acid
accugccacugaugaggccguuaggccgaawccugcag

SEQ ID NO: 5595 - RNA, 38 nt, Artificial Sequence
  Description of Artificial Sequence:  Enzymatic Nucleic Acid
caccugcccugaugaggccguuaggccgaawgccugca

SEQ ID NO: 5596 - RNA, 38 nt, Artificial Sequence
  Description of Artificial Sequence:  Enzymatic Nucleic Acid
cugccacccugaugaggccguuaggccgaawccaggcc

SEQ ID NO: 5597 - RNA, 38 nt, Artificial Sequence
  Description of Artificial Sequence:  Enzymatic Nucleic Acid
cauggggccugaugaggccguuaggccgaawccaccug

SEQ ID NO: 5598 - RNA, 38 nt, Artificial Sequence
  Description of Artificial Sequence:  Enzymatic Nucleic Acid
gggcauggcugaugaggccguuaggccgaawcugccac

SEQ ID NO: 5599 - RNA, 38 nt, Artificial Sequence
  Description of Artificial Sequence:  Enzymatic Nucleic Acid
ugggcaugcugaugaggccguuaggccgaawgcugcca

SEQ ID NO: 5600 - RNA, 38 nt, Artificial Sequence
  Description of Artificial Sequence:  Enzymatic Nucleic Acid
cugggcaucugaugaggccguuaggccgaawggcugcc

SEQ ID NO: 5601 - RNA, 38 nt, Artificial Sequence
  Description of Artificial Sequence:  Enzymatic Nucleic Acid
ccugggcacugaugaggccguuaggccgaawgggcugc

SEQ ID NO: 5602 - RNA, 38 nt, Artificial Sequence
  Description of Artificial Sequence:  Enzymatic Nucleic Acid
ggcaccugcugaugaggccguuaggccgaawcaugggg

SEQ ID NO: 5603 - RNA, 38 nt, Artificial Sequence
  Description of Artificial Sequence:  Enzymatic Nucleic Acid
aggcaccucugaugaggccguuaggccgaawgcauggg

SEQ ID NO: 5604 - RNA, 38 nt, Artificial Sequence
  Description of Artificial Sequence:  Enzymatic Nucleic Acid
caggcacccugaugaggccguuaggccgaawggcaugg

SEQ ID NO: 5605 - RNA, 38 nt, Artificial Sequence
  Description of Artificial Sequence:  Enzymatic Nucleic Acid
cauacgcacugaugaggccguuaggccgaawcaccugg

SEQ ID NO: 5606 - RNA, 38 nt, Artificial Sequence
  Description of Artificial Sequence:  Enzymatic Nucleic Acid
gcauacgccugaugaggccguuaggccgaawgcaccug

SEQ ID NO: 5607 - RNA, 38 nt, Artificial Sequence
  Description of Artificial Sequence:  Enzymatic Nucleic Acid
cucauugucugaugaggccguuaggccgaawcauacgc

SEQ ID NO: 5608 - RNA, 38 nt, Artificial Sequence
  Description of Artificial Sequence:  Enzymatic Nucleic Acid
gggcucaucugaugaggccguuaggccgaawuagcaua

SEQ ID NO: 5609 - RNA, 38 nt, Artificial Sequence
  Description of Artificial Sequence:  Enzymatic Nucleic Acid
ucaccuugcugaugaggccguuaggccgaawcucauug

SEQ ID NO: 5610 - RNA, 38 nt, Artificial Sequence
  Description of Artificial Sequence:  Enzymatic Nucleic Acid
gucaccuucugaugaggccguuaggccgaawgcucauu

SEQ ID NO: 5611 - RNA, 38 nt, Artificial Sequence
  Description of Artificial Sequence:  Enzymatic Nucleic Acid
cgucaccucugaugaggccguuaggccgaawggcucau

SEQ ID NO: 5612 - RNA, 38 nt, Artificial Sequence
  Description of Artificial Sequence:  Enzymatic Nucleic Acid
gggcagcucugaugaggccguuaggccgaawucgucac

SEQ ID NO: 5613 - RNA, 38 nt, Artificial Sequence
  Description of Artificial Sequence:  Enzymatic Nucleic Acid
cugggggccugaugaggccguuaggccgaawcuugucg

SEQ ID NO: 5614 - RNA, 38 nt, Artificial Sequence
  Description of Artificial Sequence:  Enzymatic Nucleic Acid
cugcugggcugaugaggccguuaggccgaawcagcuug

SEQ ID NO: 5615 - RNA, 38 nt, Artificial Sequence
  Description of Artificial Sequence:  Enzymatic Nucleic Acid
ccugcuggcugaugaggccguuaggccgaawgcagcuu

SEQ ID NO: 5616 - RNA, 38 nt, Artificial Sequence
  Description of Artificial Sequence:  Enzymatic Nucleic Acid
cccugcugcugaugaggccguuaggccgaawggcagcu

SEQ ID NO: 5617 - RNA, 38 nt, Artificial Sequence
  Description of Artificial Sequence:  Enzymatic Nucleic Acid
gcccugcucugaugaggccguuaggccgaawgggcagc

SEQ ID NO: 5618 - RNA, 38 nt, Artificial Sequence
  Description of Artificial Sequence:  Enzymatic Nucleic Acid
ggcccugccugaugaggccguuaggccgaawggggcag

SEQ ID NO: 5619 - RNA, 38 nt, Artificial Sequence
  Description of Artificial Sequence:  Enzymatic Nucleic Acid
gcaggccccugaugaggccguuaggccgaawcuggggg

SEQ ID NO: 5620 - RNA, 38 nt, Artificial Sequence
  Description of Artificial Sequence:  Enzymatic Nucleic Acid
agccugcacugaugaggccguuaggccgaawcccugcu

SEQ ID NO: 5621 - RNA, 38 nt, Artificial Sequence
  Description of Artificial Sequence:  Enzymatic Nucleic Acid
cagccugccugaugaggccguuaggccgaawgcccugc

SEQ ID NO: 5622 - RNA, 38 nt, Artificial Sequence
  Description of Artificial Sequence:  Enzymatic Nucleic Acid
gcacagcccugaugaggccguuaggccgaawcaggccc

SEQ ID NO: 5623 - RNA, 38 nt, Artificial Sequence
  Description of Artificial Sequence:  Enzymatic Nucleic Acid
acgggcaccugaugaggccguuaggccgaawccugcag

SEQ ID NO: 5624 - RNA, 38 nt, Artificial Sequence
  Description of Artificial Sequence:  Enzymatic Nucleic Acid
ugcccacgcugaugaggccguuaggccgaawcacagcc

SEQ ID NO: 5625 - RNA, 38 nt, Artificial Sequence
  Description of Artificial Sequence:  Enzymatic Nucleic Acid
augcccaccugaugaggccguuaggccgaawgcacagc

SEQ ID NO: 5626 - RNA, 38 nt, Artificial Sequence
  Description of Artificial Sequence:  Enzymatic Nucleic Acid
agcagggacugaugaggccguuaggccgaawcccacgg

SEQ ID NO: 5627 - RNA, 38 nt, Artificial Sequence
  Description of Artificial Sequence:  Enzymatic Nucleic Acid
ggcagcagcugaugaggccguuaggccgaawaugccca

SEQ ID NO: 5628 - RNA, 38 nt, Artificial Sequence
  Description of Artificial Sequence:  Enzymatic Nucleic Acid
uggcagcacugaugaggccguuaggccgaawgaugccc

SEQ ID NO: 5629 - RNA, 38 nt, Artificial Sequence
  Description of Artificial Sequence:  Enzymatic Nucleic Acid
cuggcagccugaugaggccguuaggccgaawggaugcc

SEQ ID NO: 5630 - RNA, 38 nt, Artificial Sequence
  Description of Artificial Sequence:  Enzymatic Nucleic Acid
uggcuggccugaugaggccguuaggccgaawcagggau

SEQ ID NO: 5631 - RNA, 38 nt, Artificial Sequence
  Description of Artificial Sequence:  Enzymatic Nucleic Acid
cgcuggcucugaugaggccguuaggccgaawcagcagg

SEQ ID NO: 5632 - RNA, 38 nt, Artificial Sequence
  Description of Artificial Sequence:  Enzymatic Nucleic Acid
gcgcuggccugaugaggccguuaggccgaawgcagcag

SEQ ID NO: 5633 - RNA, 38 nt, Artificial Sequence
  Description of Artificial Sequence:  Enzymatic Nucleic Acid
gaugcgcucugaugaggccguuaggccgaawcuggcag

SEQ ID NO: 5634 - RNA, 38 nt, Artificial Sequence
  Description of Artificial Sequence:  Enzymatic Nucleic Acid
agaugcgccugaugaggccguuaggccgaawgcuggca

SEQ ID NO: 5635 - RNA, 38 nt, Artificial Sequence
  Description of Artificial Sequence:  Enzymatic Nucleic Acid
caggaagacugaugaggccguuaggccgaawcgcuggc

SEQ ID NO: 5636 - RNA, 38 nt, Artificial Sequence
  Description of Artificial Sequence:  Enzymatic Nucleic Acid
gugcaggacugaugaggccguuaggccgaawaugcgcu

SEQ ID NO: 5637 - RNA, 38 nt, Artificial Sequence
  Description of Artificial Sequence:  Enzymatic Nucleic Acid
gccgugcacugaugaggccguuaggccgaawaagaugc

SEQ ID NO: 5638 - RNA, 38 nt, Artificial Sequence
  Description of Artificial Sequence:  Enzymatic Nucleic Acid
ugccgugccugaugaggccguuaggccgaawgaagaug

SEQ ID NO: 5639 - RNA, 38 nt, Artificial Sequence
  Description of Artificial Sequence:  Enzymatic Nucleic Acid
gguugccgcugaugaggccguuaggccgaawcaggaag

SEQ ID NO: 5640 - RNA, 38 nt, Artificial Sequence
  Description of Artificial Sequence:  Enzymatic Nucleic Acid
gaugcggucugaugaggccguuaggccgaawccgugca

SEQ ID NO: 5641 - RNA, 38 nt, Artificial Sequence
  Description of Artificial Sequence:  Enzymatic Nucleic Acid
cgagaugccugaugaggccguuaggccgaawuugccgu

SEQ ID NO: 5642 - RNA, 38 nt, Artificial Sequence
  Description of Artificial Sequence:  Enzymatic Nucleic Acid
augcgagacugaugaggccguuaggccgaawcgguugc

SEQ ID NO: 5643 - RNA, 38 nt, Artificial Sequence
  Description of Artificial Sequence:  Enzymatic Nucleic Acid
cacaugcgcugaugaggccguuaggccgaawaugcggu

SEQ ID NO: 5644 - RNA, 38 nt, Artificial Sequence
  Description of Artificial Sequence:  Enzymatic Nucleic Acid
cuggcacacugaugaggccguuaggccgaawcgagaug

SEQ ID NO: 5645 - RNA, 38 nt, Artificial Sequence
  Description of Artificial Sequence:  Enzymatic Nucleic Acid
uggcagcucugaugaggccguuaggccgaawcacaugc

SEQ ID NO: 5646 - RNA, 38 nt, Artificial Sequence
  Description of Artificial Sequence:  Enzymatic Nucleic Acid
cuggcagccugaugaggccguuaggccgaawgcacaug

SEQ ID NO: 5647 - RNA, 38 nt, Artificial Sequence
  Description of Artificial Sequence:  Enzymatic Nucleic Acid
aagcuggccugaugaggccguuaggccgaawcuggcac

SEQ ID NO: 5648 - RNA, 38 nt, Artificial Sequence
  Description of Artificial Sequence:  Enzymatic Nucleic Acid
cggaagcucugaugaggccguuaggccgaawcagcugg

SEQ ID NO: 5649 - RNA, 38 nt, Artificial Sequence
  Description of Artificial Sequence:  Enzymatic Nucleic Acid
acggaagccugaugaggccguuaggccgaawgcagcug

SEQ ID NO: 5650 - RNA, 38 nt, Artificial Sequence
  Description of Artificial Sequence:  Enzymatic Nucleic Acid
ggcacggacugaugaggccguuaggccgaawcuggcag

SEQ ID NO: 5651 - RNA, 38 nt, Artificial Sequence
  Description of Artificial Sequence:  Enzymatic Nucleic Acid
gcaggcaccugaugaggccguuaggccgaawaagcugg

SEQ ID NO: 5652 - RNA, 38 nt, Artificial Sequence
  Description of Artificial Sequence:  Enzymatic Nucleic Acid
uugcggcacugaugaggccguuaggccgaawcacggaa

SEQ ID NO: 5653 - RNA, 38 nt, Artificial Sequence
  Description of Artificial Sequence:  Enzymatic Nucleic Acid
guugcggccugaugaggccguuaggccgaawgcacgga

SEQ ID NO: 5654 - RNA, 38 nt, Artificial Sequence
  Description of Artificial Sequence:  Enzymatic Nucleic Acid
gagguugccugaugaggccguuaggccgaawcaggcac

SEQ ID NO: 5655 - RNA, 38 nt, Artificial Sequence
  Description of Artificial Sequence:  Enzymatic Nucleic Acid
ggugaggucugaugaggccguuaggccgaawcggcagg

SEQ ID NO: 5656 - RNA, 38 nt, Artificial Sequence
  Description of Artificial Sequence:  Enzymatic Nucleic Acid
gauggugacugaugaggccguuaggccgaawuugcggc

SEQ ID NO: 5657 - RNA, 38 nt, Artificial Sequence
  Description of Artificial Sequence:  Enzymatic Nucleic Acid
ggauggugcugaugaggccguuaggccgaawguugcgg

SEQ ID NO: 5658 - RNA, 38 nt, Artificial Sequence
  Description of Artificial Sequence:  Enzymatic Nucleic Acid
caggauggcugaugaggccguuaggccgaawagguugc

SEQ ID NO: 5659 - RNA, 38 nt, Artificial Sequence
  Description of Artificial Sequence:  Enzymatic Nucleic Acid
cacaggaucugaugaggccguuaggccgaawugagguu

SEQ ID NO: 5660 - RNA, 38 nt, Artificial Sequence
  Description of Artificial Sequence:  Enzymatic Nucleic Acid
ccacaggacugaugaggccguuaggccgaawgugaggu

SEQ ID NO: 5661 - RNA, 38 nt, Artificial Sequence
  Description of Artificial Sequence:  Enzymatic Nucleic Acid
cagccacacugaugaggccguuaggccgaawaugguga

SEQ ID NO: 5662 - RNA, 38 nt, Artificial Sequence
  Description of Artificial Sequence:  Enzymatic Nucleic Acid
gcagccaccugaugaggccguuaggccgaawgauggug

SEQ ID NO: 5663 - RNA, 38 nt, Artificial Sequence
  Description of Artificial Sequence:  Enzymatic Nucleic Acid
ucgagugccugaugaggccguuaggccgaawccacagg

SEQ ID NO: 5664 - RNA, 38 nt, Artificial Sequence
  Description of Artificial Sequence:  Enzymatic Nucleic Acid
cauucgagcugaugaggccguuaggccgaawcagccac

SEQ ID NO: 5665 - RNA, 38 nt, Artificial Sequence
  Description of Artificial Sequence:  Enzymatic Nucleic Acid
cacauucgcugaugaggccguuaggccgaawugcagcc

SEQ ID NO: 5666 - RNA, 38 nt, Artificial Sequence
  Description of Artificial Sequence:  Enzymatic Nucleic Acid
uucgggcccugaugaggccguuaggccgaawcacauuc

SEQ ID NO: 5667 - RNA, 38 nt, Artificial Sequence
  Description of Artificial Sequence:  Enzymatic Nucleic Acid
ucaauucgcugaugaggccguuaggccgaawccagcac

SEQ ID NO: 5668 - RNA, 38 nt, Artificial Sequence
  Description of Artificial Sequence:  Enzymatic Nucleic Acid
aucaauuccugaugaggccguuaggccgaawgccagca

SEQ ID NO: 5669 - RNA, 38 nt, Artificial Sequence
  Description of Artificial Sequence:  Enzymatic Nucleic Acid
gugaaggccugaugaggccguuaggccgaawccgcauc

SEQ ID NO: 5670 - RNA, 38 nt, Artificial Sequence
  Description of Artificial Sequence:  Enzymatic Nucleic Acid
ccagugaacugaugaggccguuaggccgaawcagccgc

SEQ ID NO: 5671 - RNA, 38 nt, Artificial Sequence
  Description of Artificial Sequence:  Enzymatic Nucleic Acid
gccagugacugaugaggccguuaggccgaawgcagccg

SEQ ID NO: 5672 - RNA, 38 nt, Artificial Sequence
  Description of Artificial Sequence:  Enzymatic Nucleic Acid
caggccagcugaugaggccguuaggccgaawaaggcag

SEQ ID NO: 5673 - RNA, 38 nt, Artificial Sequence
  Description of Artificial Sequence:  Enzymatic Nucleic Acid
gccaggcccugaugaggccguuaggccgaawugaaggc

SEQ ID NO: 5674 - RNA, 38 nt, Artificial Sequence
  Description of Artificial Sequence:  Enzymatic Nucleic Acid
gagggccacugaugaggccguuaggccgaawccaguga

SEQ ID NO: 5675 - RNA, 38 nt, Artificial Sequence
  Description of Artificial Sequence:  Enzymatic Nucleic Acid
ggagggcccugaugaggccguuaggccgaawgccagug

SEQ ID NO: 5676 - RNA, 38 nt, Artificial Sequence
  Description of Artificial Sequence:  Enzymatic Nucleic Acid
uccaggagcugaugaggccguuaggccgaawccaggcc

SEQ ID NO: 5677 - RNA, 38 nt, Artificial Sequence
  Description of Artificial Sequence:  Enzymatic Nucleic Acid
cuccaggacugaugaggccguuaggccgaawgccaggc

SEQ ID NO: 5678 - RNA, 38 nt, Artificial Sequence
  Description of Artificial Sequence:  Enzymatic Nucleic Acid
gcuccaggcugaugaggccguuaggccgaawggccagg

SEQ ID NO: 5679 - RNA, 38 nt, Artificial Sequence
  Description of Artificial Sequence:  Enzymatic Nucleic Acid
cugcuccacugaugaggccguuaggccgaawagggcca

SEQ ID NO: 5680 - RNA, 38 nt, Artificial Sequence
  Description of Artificial Sequence:  Enzymatic Nucleic Acid
gcugcucccugaugaggccguuaggccgaawgagggcc

SEQ ID NO: 5681 - RNA, 38 nt, Artificial Sequence
  Description of Artificial Sequence:  Enzymatic Nucleic Acid
gguccagccugaugaggccguuaggccgaawcuccagg

SEQ ID NO: 5682 - RNA, 38 nt, Artificial Sequence
  Description of Artificial Sequence:  Enzymatic Nucleic Acid
ugaggucccugaugaggccguuaggccgaawcugcucc

SEQ ID NO: 5683 - RNA, 38 nt, Artificial Sequence
  Description of Artificial Sequence:  Enzymatic Nucleic Acid
aucgcugacugaugaggccguuaggccgaawuccagcu

SEQ ID NO: 5684 - RNA, 38 nt, Artificial Sequence
  Description of Artificial Sequence:  Enzymatic Nucleic Acid
uaucgcugcugaugaggccguuaggccgaawguccagc

SEQ ID NO: 5685 - RNA, 38 nt, Artificial Sequence
  Description of Artificial Sequence:  Enzymatic Nucleic Acid
auuaucgccugaugaggccguuaggccgaawaggucca

SEQ ID NO: 5686 - RNA, 38 nt, Artificial Sequence
  Description of Artificial Sequence:  Enzymatic Nucleic Acid
cggagcugcugaugaggccguuaggccgaawcauuauc

SEQ ID NO: 5687 - RNA, 38 nt, Artificial Sequence
  Description of Artificial Sequence:  Enzymatic Nucleic Acid
accggagccugaugaggccguuaggccgaawugcauua

SEQ ID NO: 5688 - RNA, 38 nt, Artificial Sequence
  Description of Artificial Sequence:  Enzymatic Nucleic Acid
cagaccggcugaugaggccguuaggccgaawcugugca

SEQ ID NO: 5689 - RNA, 38 nt, Artificial Sequence
  Description of Artificial Sequence:  Enzymatic Nucleic Acid
cacagacccugaugaggccguuaggccgaawagcugug

SEQ ID NO: 5690 - RNA, 38 nt, Artificial Sequence
  Description of Artificial Sequence:  Enzymatic Nucleic Acid
ggguccaccugaugaggccguuaggccgaawaccggag

SEQ ID NO: 5691 - RNA, 38 nt, Artificial Sequence
  Description of Artificial Sequence:  Enzymatic Nucleic Acid
uguggcagcugaugaggccguuaggccgaawuccacag

SEQ ID NO: 5692 - RNA, 38 nt, Artificial Sequence
  Description of Artificial Sequence:  Enzymatic Nucleic Acid
auguggcacugaugaggccguuaggccgaawguccaca

SEQ ID NO: 5693 - RNA, 38 nt, Artificial Sequence
  Description of Artificial Sequence:  Enzymatic Nucleic Acid
aauguggccugaugaggccguuaggccgaawgguccac

SEQ ID NO: 5694 - RNA, 38 nt, Artificial Sequence
  Description of Artificial Sequence:  Enzymatic Nucleic Acid
uggaaugucugaugaggccguuaggccgaawcaggguc

SEQ ID NO: 5695 - RNA, 38 nt, Artificial Sequence
  Description of Artificial Sequence:  Enzymatic Nucleic Acid
guggaaugcugaugaggccguuaggccgaawgcagggu

SEQ ID NO: 5696 - RNA, 38 nt, Artificial Sequence
  Description of Artificial Sequence:  Enzymatic Nucleic Acid
ccguggaacugaugaggccguuaggccgaawuggcagg

SEQ ID NO: 5697 - RNA, 38 nt, Artificial Sequence
  Description of Artificial Sequence:  Enzymatic Nucleic Acid
caggccgucugaugaggccguuaggccgaawaaugugg

SEQ ID NO: 5698 - RNA, 38 nt, Artificial Sequence
  Description of Artificial Sequence:  Enzymatic Nucleic Acid
ccaggccgcugaugaggccguuaggccgaawgaaugug

SEQ ID NO: 5699 - RNA, 38 nt, Artificial Sequence
  Description of Artificial Sequence:  Enzymatic Nucleic Acid
gcggcccacugaugaggccguuaggccgaawccgugga

SEQ ID NO: 5700 - RNA, 38 nt, Artificial Sequence
  Description of Artificial Sequence:  Enzymatic Nucleic Acid
ggcggccccugaugaggccguuaggccgaawgccgugg

SEQ ID NO: 5701 - RNA, 38 nt, Artificial Sequence
  Description of Artificial Sequence:  Enzymatic Nucleic Acid
guguaggccugaugaggccguuaggccgaawcccaggc

SEQ ID NO: 5702 - RNA, 38 nt, Artificial Sequence
  Description of Artificial Sequence:  Enzymatic Nucleic Acid
cguguguacugaugaggccguuaggccgaawcggccca

SEQ ID NO: 5703 - RNA, 38 nt, Artificial Sequence
  Description of Artificial Sequence:  Enzymatic Nucleic Acid
gcgugugucugaugaggccguuaggccgaawgcggccc

SEQ ID NO: 5704 - RNA, 38 nt, Artificial Sequence
  Description of Artificial Sequence:  Enzymatic Nucleic Acid
gcagcgugcugaugaggccguuaggccgaawuaggcgg

SEQ ID NO: 5705 - RNA, 38 nt, Artificial Sequence
  Description of Artificial Sequence:  Enzymatic Nucleic Acid
gugcagcgcugaugaggccguuaggccgaawuguaggc

SEQ ID NO: 5706 - RNA, 38 nt, Artificial Sequence
  Description of Artificial Sequence:  Enzymatic Nucleic Acid
ccaggugccugaugaggccguuaggccgaawcgugugu

SEQ ID NO: 5707 - RNA, 38 nt, Artificial Sequence
  Description of Artificial Sequence:  Enzymatic Nucleic Acid
gguccaggcugaugaggccguuaggccgaawcagcgug

SEQ ID NO: 5708 - RNA, 38 nt, Artificial Sequence
  Description of Artificial Sequence:  Enzymatic Nucleic Acid
gcgguccacugaugaggccguuaggccgaawugcagcg

SEQ ID NO: 5709 - RNA, 38 nt, Artificial Sequence
  Description of Artificial Sequence:  Enzymatic Nucleic Acid
agcggucccugaugaggccguuaggccgaawgugcagc

SEQ ID NO: 5710 - RNA, 38 nt, Artificial Sequence
  Description of Artificial Sequence:  Enzymatic Nucleic Acid
gccgcagccugaugaggccguuaggccgaawuccaggu

SEQ ID NO: 5711 - RNA, 38 nt, Artificial Sequence
  Description of Artificial Sequence:  Enzymatic Nucleic Acid
caggccgccugaugaggccguuaggccgaawcggucca

SEQ ID NO: 5712 - RNA, 38 nt, Artificial Sequence
  Description of Artificial Sequence:  Enzymatic Nucleic Acid
cuccugcacugaugaggccguuaggccgaawccgcagc

SEQ ID NO: 5713 - RNA, 38 nt, Artificial Sequence
  Description of Artificial Sequence:  Enzymatic Nucleic Acid
gcuccugccugaugaggccguuaggccgaawgccgcag

SEQ ID NO: 5714 - RNA, 38 nt, Artificial Sequence
  Description of Artificial Sequence:  Enzymatic Nucleic Acid
ccagcucccugaugaggccguuaggccgaawcaggccg

SEQ ID NO: 5715 - RNA, 38 nt, Artificial Sequence
  Description of Artificial Sequence:  Enzymatic Nucleic Acid
ccgggccccugaugaggccguuaggccgaawcuccugc

SEQ ID NO: 5716 - RNA, 38 nt, Artificial Sequence
  Description of Artificial Sequence:  Enzymatic Nucleic Acid
cagccccgcugaugaggccguuaggccgaawcccagcu

SEQ ID NO: 5717 - RNA, 38 nt, Artificial Sequence
  Description of Artificial Sequence:  Enzymatic Nucleic Acid
acagcccccugaugaggccguuaggccgaawgcccagc

SEQ ID NO: 5718 - RNA, 38 nt, Artificial Sequence
  Description of Artificial Sequence:  Enzymatic Nucleic Acid
cgcggaaccugaugaggccguuaggccgaawccccggg

SEQ ID NO: 5719 - RNA, 38 nt, Artificial Sequence
  Description of Artificial Sequence:  Enzymatic Nucleic Acid
caggccgccugaugaggccguuaggccgaawaacagcc

SEQ ID NO: 5720 - RNA, 38 nt, Artificial Sequence
  Description of Artificial Sequence:  Enzymatic Nucleic Acid
ggcagccacugaugaggccguuaggccgaawccgcgga

SEQ ID NO: 5721 - RNA, 38 nt, Artificial Sequence
  Description of Artificial Sequence:  Enzymatic Nucleic Acid
gggcagcccugaugaggccguuaggccgaawgccgcgg

SEQ ID NO: 5722 - RNA, 38 nt, Artificial Sequence
  Description of Artificial Sequence:  Enzymatic Nucleic Acid
ugcagggccugaugaggccguuaggccgaawccaggcc

SEQ ID NO: 5723 - RNA, 38 nt, Artificial Sequence
  Description of Artificial Sequence:  Enzymatic Nucleic Acid
uacugcagcugaugaggccguuaggccgaawcagccag

SEQ ID NO: 5724 - RNA, 38 nt, Artificial Sequence
  Description of Artificial Sequence:  Enzymatic Nucleic Acid
guacugcacugaugaggccguuaggccgaawgcagcca

SEQ ID NO: 5725 - RNA, 38 nt, Artificial Sequence
  Description of Artificial Sequence:  Enzymatic Nucleic Acid
gguacugccugaugaggccguuaggccgaawggcagcc

SEQ ID NO: 5726 - RNA, 38 nt, Artificial Sequence
  Description of Artificial Sequence:  Enzymatic Nucleic Acid
agagguaccugaugaggccguuaggccgaawcagggca

SEQ ID NO: 5727 - RNA, 38 nt, Artificial Sequence
  Description of Artificial Sequence:  Enzymatic Nucleic Acid
cagguagacugaugaggccguuaggccgaawuacugca

SEQ ID NO: 5728 - RNA, 38 nt, Artificial Sequence
  Description of Artificial Sequence:  Enzymatic Nucleic Acid
gcagguagcugaugaggccguuaggccgaawguacugc

SEQ ID NO: 5729 - RNA, 38 nt, Artificial Sequence
  Description of Artificial Sequence:  Enzymatic Nucleic Acid
cugcaggucugaugaggccguuaggccgaawagguacu

SEQ ID NO: 5730 - RNA, 38 nt, Artificial Sequence
  Description of Artificial Sequence:  Enzymatic Nucleic Acid
guccugcacugaugaggccguuaggccgaawuagaggu

SEQ ID NO: 5731 - RNA, 38 nt, Artificial Sequence
  Description of Artificial Sequence:  Enzymatic Nucleic Acid
uguccugccugaugaggccguuaggccgaawguagagg

SEQ ID NO: 5732 - RNA, 38 nt, Artificial Sequence
  Description of Artificial Sequence:  Enzymatic Nucleic Acid
cguugucccugaugaggccguuaggccgaawcagguag

SEQ ID NO: 5733 - RNA, 38 nt, Artificial Sequence
  Description of Artificial Sequence:  Enzymatic Nucleic Acid
cagcgcgucugaugaggccguuaggccgaawuccugca

SEQ ID NO: 5734 - RNA, 38 nt, Artificial Sequence
  Description of Artificial Sequence:  Enzymatic Nucleic Acid
gugccugccugaugaggccguuaggccgaawcgcguug

SEQ ID NO: 5735 - RNA, 38 nt, Artificial Sequence
  Description of Artificial Sequence:  Enzymatic Nucleic Acid
gcagugcccugaugaggccguuaggccgaawcagcgcg

SEQ ID NO: 5736 - RNA, 38 nt, Artificial Sequence
  Description of Artificial Sequence:  Enzymatic Nucleic Acid
ucaggcagcugaugaggccguuaggccgaawccugcag

SEQ ID NO: 5737 - RNA, 38 nt, Artificial Sequence
  Description of Artificial Sequence:  Enzymatic Nucleic Acid
caucaggccugaugaggccguuaggccgaawugccugc

SEQ ID NO: 5738 - RNA, 38 nt, Artificial Sequence
  Description of Artificial Sequence:  Enzymatic Nucleic Acid
ugucaucacugaugaggccguuaggccgaawcagugcc

SEQ ID NO: 5739 - RNA, 38 nt, Artificial Sequence
  Description of Artificial Sequence:  Enzymatic Nucleic Acid
gugucauccugaugaggccguuaggccgaawgcagugc

SEQ ID NO: 5740 - RNA, 38 nt, Artificial Sequence
  Description of Artificial Sequence:  Enzymatic Nucleic Acid
gcggaaggcugaugaggccguuaggccgaawucaucag

SEQ ID NO: 5741 - RNA, 38 nt, Artificial Sequence
  Description of Artificial Sequence:  Enzymatic Nucleic Acid
ucgcggaacugaugaggccguuaggccgaawugucauc

SEQ ID NO: 5742 - RNA, 38 nt, Artificial Sequence
  Description of Artificial Sequence:  Enzymatic Nucleic Acid
gucgcggacugaugaggccguuaggccgaawgugucau

SEQ ID NO: 5743 - RNA, 38 nt, Artificial Sequence
  Description of Artificial Sequence:  Enzymatic Nucleic Acid
caggucgccugaugaggccguuaggccgaawaaggugu

SEQ ID NO: 5744 - RNA, 38 nt, Artificial Sequence
  Description of Artificial Sequence:  Enzymatic Nucleic Acid
guugcccacugaugaggccguuaggccgaawucgcgga

SEQ ID NO: 5745 - RNA, 38 nt, Artificial Sequence
  Description of Artificial Sequence:  Enzymatic Nucleic Acid
gguugccccugaugaggccguuaggccgaawgucgcgg

SEQ ID NO: 5746 - RNA, 38 nt, Artificial Sequence
  Description of Artificial Sequence:  Enzymatic Nucleic Acid
ugugaggucugaugaggccguuaggccgaawcccaggu

SEQ ID NO: 5747 - RNA, 38 nt, Artificial Sequence
  Description of Artificial Sequence:  Enzymatic Nucleic Acid
gugugugacugaugaggccguuaggccgaawuugccca

SEQ ID NO: 5748 - RNA, 38 nt, Artificial Sequence
  Description of Artificial Sequence:  Enzymatic Nucleic Acid
ggugugugcugaugaggccguuaggccgaawguugccc

SEQ ID NO: 5749 - RNA, 38 nt, Artificial Sequence
  Description of Artificial Sequence:  Enzymatic Nucleic Acid
gaggugugcugaugaggccguuaggccgaawagguugc

SEQ ID NO: 5750 - RNA, 38 nt, Artificial Sequence
  Description of Artificial Sequence:  Enzymatic Nucleic Acid
aagaggugcugaugaggccguuaggccgaawugagguu

SEQ ID NO: 5751 - RNA, 38 nt, Artificial Sequence
  Description of Artificial Sequence:  Enzymatic Nucleic Acid
ggaagaggcugaugaggccguuaggccgaawugugagg

SEQ ID NO: 5752 - RNA, 38 nt, Artificial Sequence
  Description of Artificial Sequence:  Enzymatic Nucleic Acid
caggaagacugaugaggccguuaggccgaawuguguga

SEQ ID NO: 5753 - RNA, 38 nt, Artificial Sequence
  Description of Artificial Sequence:  Enzymatic Nucleic Acid
gcaggaagcugaugaggccguuaggccgaawgugugug

SEQ ID NO: 5754 - RNA, 38 nt, Artificial Sequence
  Description of Artificial Sequence:  Enzymatic Nucleic Acid
gugcaggacugaugaggccguuaggccgaawaggugug

SEQ ID NO: 5755 - RNA, 38 nt, Artificial Sequence
  Description of Artificial Sequence:  Enzymatic Nucleic Acid
gccgugcacugaugaggccguuaggccgaawaagaggu

SEQ ID NO: 5756 - RNA, 38 nt, Artificial Sequence
  Description of Artificial Sequence:  Enzymatic Nucleic Acid
ugccgugccugaugaggccguuaggccgaawgaagagg

SEQ ID NO: 5757 - RNA, 38 nt, Artificial Sequence
  Description of Artificial Sequence:  Enzymatic Nucleic Acid
ggagaugccugaugaggccguuaggccgaawuugccgu

SEQ ID NO: 5758 - RNA, 38 nt, Artificial Sequence
  Description of Artificial Sequence:  Enzymatic Nucleic Acid
gcuggagacugaugaggccguuaggccgaawcgguugc

SEQ ID NO: 5759 - RNA, 38 nt, Artificial Sequence
  Description of Artificial Sequence:  Enzymatic Nucleic Acid
cacgcuggcugaugaggccguuaggccgaawaugcggu

SEQ ID NO: 5760 - RNA, 38 nt, Artificial Sequence
  Description of Artificial Sequence:  Enzymatic Nucleic Acid
ggcacgcucugaugaggccguuaggccgaawagaugcg

SEQ ID NO: 5761 - RNA, 38 nt, Artificial Sequence
  Description of Artificial Sequence:  Enzymatic Nucleic Acid
gggcacgccugaugaggccguuaggccgaawgagaugc

SEQ ID NO: 5762 - RNA, 38 nt, Artificial Sequence
  Description of Artificial Sequence:  Enzymatic Nucleic Acid
cgcgcucgcugaugaggccguuaggccgaawcacgcug

SEQ ID NO: 5763 - RNA, 38 nt, Artificial Sequence
  Description of Artificial Sequence:  Enzymatic Nucleic Acid
gcgcgcuccugaugaggccguuaggccgaawgcacgcu

SEQ ID NO: 5764 - RNA, 38 nt, Artificial Sequence
  Description of Artificial Sequence:  Enzymatic Nucleic Acid
ccacggaacugaugaggccguuaggccgaawcgcgcuc

SEQ ID NO: 5765 - RNA, 38 nt, Artificial Sequence
  Description of Artificial Sequence:  Enzymatic Nucleic Acid
cccacggacugaugaggccguuaggccgaawgcgcgcu

SEQ ID NO: 5766 - RNA, 38 nt, Artificial Sequence
  Description of Artificial Sequence:  Enzymatic Nucleic Acid
cagcccaccugaugaggccguuaggccgaawaaggcgc

SEQ ID NO: 5767 - RNA, 38 nt, Artificial Sequence
  Description of Artificial Sequence:  Enzymatic Nucleic Acid
ggcugugccugaugaggccguuaggccgaawcccacgg

SEQ ID NO: 5768 - RNA, 38 nt, Artificial Sequence
  Description of Artificial Sequence:  Enzymatic Nucleic Acid
cgaggcugcugaugaggccguuaggccgaawcagccca

SEQ ID NO: 5769 - RNA, 38 nt, Artificial Sequence
  Description of Artificial Sequence:  Enzymatic Nucleic Acid
gucgaggccugaugaggccguuaggccgaawugcagcc

SEQ ID NO: 5770 - RNA, 38 nt, Artificial Sequence
  Description of Artificial Sequence:  Enzymatic Nucleic Acid
acggucgacugaugaggccguuaggccgaawcugugca

SEQ ID NO: 5771 - RNA, 38 nt, Artificial Sequence
  Description of Artificial Sequence:  Enzymatic Nucleic Acid
gacggucgcugaugaggccguuaggccgaawgcugugc

SEQ ID NO: 5772 - RNA, 38 nt, Artificial Sequence
  Description of Artificial Sequence:  Enzymatic Nucleic Acid
uaggagaccugaugaggccguuaggccgaawucgaggc

SEQ ID NO: 5773 - RNA, 38 nt, Artificial Sequence
  Description of Artificial Sequence:  Enzymatic Nucleic Acid
gcaguaggcugaugaggccguuaggccgaawacggucg

SEQ ID NO: 5774 - RNA, 38 nt, Artificial Sequence
  Description of Artificial Sequence:  Enzymatic Nucleic Acid
gugcaguacugaugaggccguuaggccgaawagacggu

SEQ ID NO: 5775 - RNA, 38 nt, Artificial Sequence
  Description of Artificial Sequence:  Enzymatic Nucleic Acid
ggugcagucugaugaggccguuaggccgaawgagacgg

SEQ ID NO: 5776 - RNA, 38 nt, Artificial Sequence
  Description of Artificial Sequence:  Enzymatic Nucleic Acid
ucuggugccugaugaggccguuaggccgaawuaggaga

SEQ ID NO: 5777 - RNA, 38 nt, Artificial Sequence
  Description of Artificial Sequence:  Enzymatic Nucleic Acid
gguucuggcugaugaggccguuaggccgaawcaguagg

SEQ ID NO: 5778 - RNA, 38 nt, Artificial Sequence
  Description of Artificial Sequence:  Enzymatic Nucleic Acid
gcgguucucugaugaggccguuaggccgaawugcagua

SEQ ID NO: 5779 - RNA, 38 nt, Artificial Sequence
  Description of Artificial Sequence:  Enzymatic Nucleic Acid
cgcgguuccugaugaggccguuaggccgaawgugcagu

SEQ ID NO: 5780 - RNA, 38 nt, Artificial Sequence
  Description of Artificial Sequence:  Enzymatic Nucleic Acid
ggccacgccugaugaggccguuaggccgaawuucuggu

SEQ ID NO: 5781 - RNA, 38 nt, Artificial Sequence
  Description of Artificial Sequence:  Enzymatic Nucleic Acid
ugcacaugcugaugaggccguuaggccgaawccacgcg

SEQ ID NO: 5782 - RNA, 38 nt, Artificial Sequence
  Description of Artificial Sequence:  Enzymatic Nucleic Acid
gugcacaucugaugaggccguuaggccgaawgccacgc

SEQ ID NO: 5783 - RNA, 38 nt, Artificial Sequence
  Description of Artificial Sequence:  Enzymatic Nucleic Acid
ggugcacacugaugaggccguuaggccgaawggccacg

SEQ ID NO: 5784 - RNA, 38 nt, Artificial Sequence
  Description of Artificial Sequence:  Enzymatic Nucleic Acid
caugcgggcugaugaggccguuaggccgaawcacaugg

SEQ ID NO: 5785 - RNA, 38 nt, Artificial Sequence
  Description of Artificial Sequence:  Enzymatic Nucleic Acid
ggcaugcgcugaugaggccguuaggccgaawugcacau

SEQ ID NO: 5786 - RNA, 38 nt, Artificial Sequence
  Description of Artificial Sequence:  Enzymatic Nucleic Acid
aggcaugccugaugaggccguuaggccgaawgugcaca

SEQ ID NO: 5787 - RNA, 38 nt, Artificial Sequence
  Description of Artificial Sequence:  Enzymatic Nucleic Acid
ggaaggcacugaugaggccguuaggccgaawcgggugc

SEQ ID NO: 5788 - RNA, 38 nt, Artificial Sequence
  Description of Artificial Sequence:  Enzymatic Nucleic Acid
ucacggaacugaugaggccguuaggccgaawcaugcgg

SEQ ID NO: 5789 - RNA, 38 nt, Artificial Sequence
  Description of Artificial Sequence:  Enzymatic Nucleic Acid
gucacggacugaugaggccguuaggccgaawgcaugcg

SEQ ID NO: 5790 - RNA, 38 nt, Artificial Sequence
  Description of Artificial Sequence:  Enzymatic Nucleic Acid
aaggucaccugaugaggccguuaggccgaawaaggcau

SEQ ID NO: 5791 - RNA, 38 nt, Artificial Sequence
  Description of Artificial Sequence:  Enzymatic Nucleic Acid
gcggccaacugaugaggccguuaggccgaawucacgga

SEQ ID NO: 5792 - RNA, 38 nt, Artificial Sequence
  Description of Artificial Sequence:  Enzymatic Nucleic Acid
ggcggccacugaugaggccguuaggccgaawgucacgg

SEQ ID NO: 5793 - RNA, 38 nt, Artificial Sequence
  Description of Artificial Sequence:  Enzymatic Nucleic Acid
caugaggccugaugaggccguuaggccgaawccaaggu

SEQ ID NO: 5794 - RNA, 38 nt, Artificial Sequence
  Description of Artificial Sequence:  Enzymatic Nucleic Acid
ugucaugacugaugaggccguuaggccgaawcggccaa

SEQ ID NO: 5795 - RNA, 38 nt, Artificial Sequence
  Description of Artificial Sequence:  Enzymatic Nucleic Acid
gugucaugcugaugaggccguuaggccgaawgcggcca

SEQ ID NO: 5796 - RNA, 38 nt, Artificial Sequence
  Description of Artificial Sequence:  Enzymatic Nucleic Acid
gagugucacugaugaggccguuaggccgaawaggcggc

SEQ ID NO: 5797 - RNA, 38 nt, Artificial Sequence
  Description of Artificial Sequence:  Enzymatic Nucleic Acid
agauagagcugaugaggccguuaggccgaawucaugag

SEQ ID NO: 5798 - RNA, 38 nt, Artificial Sequence
  Description of Artificial Sequence:  Enzymatic Nucleic Acid
acagauagcugaugaggccguuaggccgaawugucaug

SEQ ID NO: 5799 - RNA, 38 nt, Artificial Sequence
  Description of Artificial Sequence:  Enzymatic Nucleic Acid
aaacagaucugaugaggccguuaggccgaawaguguca

SEQ ID NO: 5800 - RNA, 38 nt, Artificial Sequence
  Description of Artificial Sequence:  Enzymatic Nucleic Acid
uggcaaaccugaugaggccguuaggccgaawauagagu

SEQ ID NO: 5801 - RNA, 38 nt, Artificial Sequence
  Description of Artificial Sequence:  Enzymatic Nucleic Acid
agauuguucugaugaggccguuaggccgaawcaaacag

SEQ ID NO: 5802 - RNA, 38 nt, Artificial Sequence
  Description of Artificial Sequence:  Enzymatic Nucleic Acid
uagauugucugaugaggccguuaggccgaawgcaaaca

SEQ ID NO: 5803 - RNA, 38 nt, Artificial Sequence
  Description of Artificial Sequence:  Enzymatic Nucleic Acid
ugauagaucugaugaggccguuaggccgaawuuggcaa

SEQ ID NO: 5804 - RNA, 38 nt, Artificial Sequence
  Description of Artificial Sequence:  Enzymatic Nucleic Acid
gcgcugaucugaugaggccguuaggccgaawauuguug

SEQ ID NO: 5805 - RNA, 38 nt, Artificial Sequence
  Description of Artificial Sequence:  Enzymatic Nucleic Acid
ggcagcgccugaugaggccguuaggccgaawauagauu

SEQ ID NO: 5806 - RNA, 38 nt, Artificial Sequence
  Description of Artificial Sequence:  Enzymatic Nucleic Acid
cagugggccugaugaggccguuaggccgaawcgcugau

SEQ ID NO: 5807 - RNA, 38 nt, Artificial Sequence
  Description of Artificial Sequence:  Enzymatic Nucleic Acid
ccucagugcugaugaggccguuaggccgaawcagcgcu

SEQ ID NO: 5808 - RNA, 38 nt, Artificial Sequence
  Description of Artificial Sequence:  Enzymatic Nucleic Acid
gccucagucugaugaggccguuaggccgaawgcagcgc

SEQ ID NO: 5809 - RNA, 38 nt, Artificial Sequence
  Description of Artificial Sequence:  Enzymatic Nucleic Acid
ggccucagcugaugaggccguuaggccgaawggcagcg

SEQ ID NO: 5810 - RNA, 38 nt, Artificial Sequence
  Description of Artificial Sequence:  Enzymatic Nucleic Acid
agggccuccugaugaggccguuaggccgaawugggcag

SEQ ID NO: 5811 - RNA, 38 nt, Artificial Sequence
  Description of Artificial Sequence:  Enzymatic Nucleic Acid
ggggccagcugaugaggccguuaggccgaawccucagu

SEQ ID NO: 5812 - RNA, 38 nt, Artificial Sequence
  Description of Artificial Sequence:  Enzymatic Nucleic Acid
gggggccacugaugaggccguuaggccgaawgccucag

SEQ ID NO: 5813 - RNA, 38 nt, Artificial Sequence
  Description of Artificial Sequence:  Enzymatic Nucleic Acid
ggggggcccugaugaggccguuaggccgaawggccuca

SEQ ID NO: 5814 - RNA, 38 nt, Artificial Sequence
  Description of Artificial Sequence:  Enzymatic Nucleic Acid
cgcaggggcugaugaggccguuaggccgaawccagggc

SEQ ID NO: 5815 - RNA, 38 nt, Artificial Sequence
  Description of Artificial Sequence:  Enzymatic Nucleic Acid
acgcagggcugaugaggccguuaggccgaawgccaggg

SEQ ID NO: 5816 - RNA, 38 nt, Artificial Sequence
  Description of Artificial Sequence:  Enzymatic Nucleic Acid
cacgcaggcugaugaggccguuaggccgaawggccagg

SEQ ID NO: 5817 - RNA, 38 nt, Artificial Sequence
  Description of Artificial Sequence:  Enzymatic Nucleic Acid
gcacgcagcugaugaggccguuaggccgaawgggccag

SEQ ID NO: 5818 - RNA, 38 nt, Artificial Sequence
  Description of Artificial Sequence:  Enzymatic Nucleic Acid
ggcacgcacugaugaggccguuaggccgaawggggcca

SEQ ID NO: 5819 - RNA, 38 nt, Artificial Sequence
  Description of Artificial Sequence:  Enzymatic Nucleic Acid
gggcacgccugaugaggccguuaggccgaawgggggcc

SEQ ID NO: 5820 - RNA, 38 nt, Artificial Sequence
  Description of Artificial Sequence:  Enzymatic Nucleic Acid
uacugcagcugaugaggccguuaggccgaawcacgcag

SEQ ID NO: 5821 - RNA, 38 nt, Artificial Sequence
  Description of Artificial Sequence:  Enzymatic Nucleic Acid
guacugcacugaugaggccguuaggccgaawgcacgca

SEQ ID NO: 5822 - RNA, 38 nt, Artificial Sequence
  Description of Artificial Sequence:  Enzymatic Nucleic Acid
gguacugccugaugaggccguuaggccgaawggcacgc

SEQ ID NO: 5823 - RNA, 38 nt, Artificial Sequence
  Description of Artificial Sequence:  Enzymatic Nucleic Acid
ucagguaccugaugaggccguuaggccgaawcagggca

SEQ ID NO: 5824 - RNA, 38 nt, Artificial Sequence
  Description of Artificial Sequence:  Enzymatic Nucleic Acid
gagccucacugaugaggccguuaggccgaawuacugca

SEQ ID NO: 5825 - RNA, 38 nt, Artificial Sequence
  Description of Artificial Sequence:  Enzymatic Nucleic Acid
ugagccuccugaugaggccguuaggccgaawguacugc

SEQ ID NO: 5826 - RNA, 38 nt, Artificial Sequence
  Description of Artificial Sequence:  Enzymatic Nucleic Acid
ugucguugcugaugaggccguuaggccgaawccucagg

SEQ ID NO: 5827 - RNA, 38 nt, Artificial Sequence
  Description of Artificial Sequence:  Enzymatic Nucleic Acid
guugucgucugaugaggccguuaggccgaawagccuca

SEQ ID NO: 5828 - RNA, 38 nt, Artificial Sequence
  Description of Artificial Sequence:  Enzymatic Nucleic Acid
ccaggggucugaugaggccguuaggccgaawucguuga

SEQ ID NO: 5829 - RNA, 38 nt, Artificial Sequence
  Description of Artificial Sequence:  Enzymatic Nucleic Acid
cacccaggcugaugaggccguuaggccgaawuugucgu

SEQ ID NO: 5830 - RNA, 38 nt, Artificial Sequence
  Description of Artificial Sequence:  Enzymatic Nucleic Acid
acacccagcugaugaggccguuaggccgaawguugucg

SEQ ID NO: 5831 - RNA, 38 nt, Artificial Sequence
  Description of Artificial Sequence:  Enzymatic Nucleic Acid
cacacccacugaugaggccguuaggccgaawgguuguc

SEQ ID NO: 5832 - RNA, 38 nt, Artificial Sequence
  Description of Artificial Sequence:  Enzymatic Nucleic Acid
acacaccccugaugaggccguuaggccgaawggguugu

SEQ ID NO: 5833 - RNA, 38 nt, Artificial Sequence
  Description of Artificial Sequence:  Enzymatic Nucleic Acid
ugcccggccugaugaggccguuaggccgaawucacaca

SEQ ID NO: 5834 - RNA, 38 nt, Artificial Sequence
  Description of Artificial Sequence:  Enzymatic Nucleic Acid
gcgugccccugaugaggccguuaggccgaawcagucac

SEQ ID NO: 5835 - RNA, 38 nt, Artificial Sequence
  Description of Artificial Sequence:  Enzymatic Nucleic Acid
agugggcgcugaugaggccguuaggccgaawcccggca

SEQ ID NO: 5836 - RNA, 38 nt, Artificial Sequence
  Description of Artificial Sequence:  Enzymatic Nucleic Acid
ccagagugcugaugaggccguuaggccgaawcgugccc

SEQ ID NO: 5837 - RNA, 38 nt, Artificial Sequence
  Description of Artificial Sequence:  Enzymatic Nucleic Acid
cccagagucugaugaggccguuaggccgaawgcgugcc

SEQ ID NO: 5838 - RNA, 38 nt, Artificial Sequence
  Description of Artificial Sequence:  Enzymatic Nucleic Acid
gcccagagcugaugaggccguuaggccgaawggcgugc

SEQ ID NO: 5839 - RNA, 38 nt, Artificial Sequence
  Description of Artificial Sequence:  Enzymatic Nucleic Acid
aggcccagcugaugaggccguuaggccgaawugggcgu

SEQ ID NO: 5840 - RNA, 38 nt, Artificial Sequence
  Description of Artificial Sequence:  Enzymatic Nucleic Acid
ccaggccccugaugaggccguuaggccgaawagugggc

SEQ ID NO: 5841 - RNA, 38 nt, Artificial Sequence
  Description of Artificial Sequence:  Enzymatic Nucleic Acid
ugcagccacugaugaggccguuaggccgaawcccagag

SEQ ID NO: 5842 - RNA, 38 nt, Artificial Sequence
  Description of Artificial Sequence:  Enzymatic Nucleic Acid
cugcagcccugaugaggccguuaggccgaawgcccaga

SEQ ID NO: 5843 - RNA, 38 nt, Artificial Sequence
  Description of Artificial Sequence:  Enzymatic Nucleic Acid
acuucugccugaugaggccguuaggccgaawccaggcc

SEQ ID NO: 5844 - RNA, 38 nt, Artificial Sequence
  Description of Artificial Sequence:  Enzymatic Nucleic Acid
ggaacuuccugaugaggccguuaggccgaawcagccag

SEQ ID NO: 5845 - RNA, 38 nt, Artificial Sequence
  Description of Artificial Sequence:  Enzymatic Nucleic Acid
ggagccgccugaugaggccguuaggccgaawaacuucu

SEQ ID NO: 5846 - RNA, 38 nt, Artificial Sequence
  Description of Artificial Sequence:  Enzymatic Nucleic Acid
ggaggaggcugaugaggccguuaggccgaawccgcgga

SEQ ID NO: 5847 - RNA, 38 nt, Artificial Sequence
  Description of Artificial Sequence:  Enzymatic Nucleic Acid
ucggaggacugaugaggccguuaggccgaawagccgcg

SEQ ID NO: 5848 - RNA, 38 nt, Artificial Sequence
  Description of Artificial Sequence:  Enzymatic Nucleic Acid
cucggaggcugaugaggccguuaggccgaawgagccgc

SEQ ID NO: 5849 - RNA, 38 nt, Artificial Sequence
  Description of Artificial Sequence:  Enzymatic Nucleic Acid
accucggacugaugaggccguuaggccgaawaggagcc

SEQ ID NO: 5850 - RNA, 38 nt, Artificial Sequence
  Description of Artificial Sequence:  Enzymatic Nucleic Acid
caccucggcugaugaggccguuaggccgaawgaggagc

SEQ ID NO: 5851 - RNA, 38 nt, Artificial Sequence
  Description of Artificial Sequence:  Enzymatic Nucleic Acid
ggcaccuccugaugaggccguuaggccgaawaggagga

SEQ ID NO: 5852 - RNA, 38 nt, Artificial Sequence
  Description of Artificial Sequence:  Enzymatic Nucleic Acid
ggcugcagcugaugaggccguuaggccgaawcaccucg

SEQ ID NO: 5853 - RNA, 38 nt, Artificial Sequence
  Description of Artificial Sequence:  Enzymatic Nucleic Acid
aggcugcacugaugaggccguuaggccgaawgcaccuc

SEQ ID NO: 5854 - RNA, 38 nt, Artificial Sequence
  Description of Artificial Sequence:  Enzymatic Nucleic Acid
gaggcugccugaugaggccguuaggccgaawggcaccu

SEQ ID NO: 5855 - RNA, 38 nt, Artificial Sequence
  Description of Artificial Sequence:  Enzymatic Nucleic Acid
cgggaggccugaugaggccguuaggccgaawcagggca

SEQ ID NO: 5856 - RNA, 38 nt, Artificial Sequence
  Description of Artificial Sequence:  Enzymatic Nucleic Acid
uugcgggacugaugaggccguuaggccgaawcugcagg

SEQ ID NO: 5857 - RNA, 38 nt, Artificial Sequence
  Description of Artificial Sequence:  Enzymatic Nucleic Acid
guugcgggcugaugaggccguuaggccgaawgcugcag

SEQ ID NO: 5858 - RNA, 38 nt, Artificial Sequence
  Description of Artificial Sequence:  Enzymatic Nucleic Acid
gcguugcgcugaugaggccguuaggccgaawaggcugc

SEQ ID NO: 5859 - RNA, 38 nt, Artificial Sequence
  Description of Artificial Sequence:  Enzymatic Nucleic Acid
ggcguugccugaugaggccguuaggccgaawgaggcug

SEQ ID NO: 5860 - RNA, 38 nt, Artificial Sequence
  Description of Artificial Sequence:  Enzymatic Nucleic Acid
ccaggcgucugaugaggccguuaggccgaawcgggagg

SEQ ID NO: 5861 - RNA, 38 nt, Artificial Sequence
  Description of Artificial Sequence:  Enzymatic Nucleic Acid
gccagccacugaugaggccguuaggccgaawcguugcg

SEQ ID NO: 5862 - RNA, 38 nt, Artificial Sequence
  Description of Artificial Sequence:  Enzymatic Nucleic Acid
ggccagcccugaugaggccguuaggccgaawgcguugc

SEQ ID NO: 5863 - RNA, 38 nt, Artificial Sequence
  Description of Artificial Sequence:  Enzymatic Nucleic Acid
ucacggcccugaugaggccguuaggccgaawccaggcg

SEQ ID NO: 5864 - RNA, 38 nt, Artificial Sequence
  Description of Artificial Sequence:  Enzymatic Nucleic Acid
gaggucaccugaugaggccguuaggccgaawccagcca

SEQ ID NO: 5865 - RNA, 38 nt, Artificial Sequence
  Description of Artificial Sequence:  Enzymatic Nucleic Acid
gcguuugacugaugaggccguuaggccgaawucacggc

SEQ ID NO: 5866 - RNA, 38 nt, Artificial Sequence
  Description of Artificial Sequence:  Enzymatic Nucleic Acid
ggcguuugcugaugaggccguuaggccgaawgucacgg

SEQ ID NO: 5867 - RNA, 38 nt, Artificial Sequence
  Description of Artificial Sequence:  Enzymatic Nucleic Acid
uaggcguucugaugaggccguuaggccgaawaggucac

SEQ ID NO: 5868 - RNA, 38 nt, Artificial Sequence
  Description of Artificial Sequence:  Enzymatic Nucleic Acid
ggcagcuacugaugaggccguuaggccgaawcguuuga

SEQ ID NO: 5869 - RNA, 38 nt, Artificial Sequence
  Description of Artificial Sequence:  Enzymatic Nucleic Acid
uggcagcucugaugaggccguuaggccgaawgcguuug

SEQ ID NO: 5870 - RNA, 38 nt, Artificial Sequence
  Description of Artificial Sequence:  Enzymatic Nucleic Acid
ucauuggccugaugaggccguuaggccgaawcuaggcg

SEQ ID NO: 5871 - RNA, 38 nt, Artificial Sequence
  Description of Artificial Sequence:  Enzymatic Nucleic Acid
aggucauucugaugaggccguuaggccgaawcagcuag

SEQ ID NO: 5872 - RNA, 38 nt, Artificial Sequence
  Description of Artificial Sequence:  Enzymatic Nucleic Acid
caggucaucugaugaggccguuaggccgaawgcagcua

SEQ ID NO: 5873 - RNA, 38 nt, Artificial Sequence
  Description of Artificial Sequence:  Enzymatic Nucleic Acid
gcccugcacugaugaggccguuaggccgaawucauugg

SEQ ID NO: 5874 - RNA, 38 nt, Artificial Sequence
  Description of Artificial Sequence:  Enzymatic Nucleic Acid
agcccugccugaugaggccguuaggccgaawgucauug

SEQ ID NO: 5875 - RNA, 38 nt, Artificial Sequence
  Description of Artificial Sequence:  Enzymatic Nucleic Acid
cgcagccccugaugaggccguuaggccgaawcagguca

SEQ ID NO: 5876 - RNA, 38 nt, Artificial Sequence
  Description of Artificial Sequence:  Enzymatic Nucleic Acid
cacagcgccugaugaggccguuaggccgaawcccugca

SEQ ID NO: 5877 - RNA, 38 nt, Artificial Sequence
  Description of Artificial Sequence:  Enzymatic Nucleic Acid
guggccaccugaugaggccguuaggccgaawcgcagcc

SEQ ID NO: 5878 - RNA, 38 nt, Artificial Sequence
  Description of Artificial Sequence:  Enzymatic Nucleic Acid
gggccggucugaugaggccguuaggccgaawccacagc

SEQ ID NO: 5879 - RNA, 38 nt, Artificial Sequence
  Description of Artificial Sequence:  Enzymatic Nucleic Acid
agggccggcugaugaggccguuaggccgaawgccacag

SEQ ID NO: 5880 - RNA, 38 nt, Artificial Sequence
  Description of Artificial Sequence:  Enzymatic Nucleic Acid
uaagggcccugaugaggccguuaggccgaawuggccac

SEQ ID NO: 5881 - RNA, 38 nt, Artificial Sequence
  Description of Artificial Sequence:  Enzymatic Nucleic Acid
augguaagcugaugaggccguuaggccgaawccggugg

SEQ ID NO: 5882 - RNA, 38 nt, Artificial Sequence
  Description of Artificial Sequence:  Enzymatic Nucleic Acid
gaugguaacugaugaggccguuaggccgaawgccggug

SEQ ID NO: 5883 - RNA, 38 nt, Artificial Sequence
  Description of Artificial Sequence:  Enzymatic Nucleic Acid
ggaugguacugaugaggccguuaggccgaawggccggu

SEQ ID NO: 5884 - RNA, 38 nt, Artificial Sequence
  Description of Artificial Sequence:  Enzymatic Nucleic Acid
gaugggaucugaugaggccguuaggccgaawuaagggc

SEQ ID NO: 5885 - RNA, 38 nt, Artificial Sequence
  Description of Artificial Sequence:  Enzymatic Nucleic Acid
agaugggacugaugaggccguuaggccgaawguaaggg

SEQ ID NO: 5886 - RNA, 38 nt, Artificial Sequence
  Description of Artificial Sequence:  Enzymatic Nucleic Acid
uccagaugcugaugaggccguuaggccgaawaugguaa

SEQ ID NO: 5887 - RNA, 38 nt, Artificial Sequence
  Description of Artificial Sequence:  Enzymatic Nucleic Acid
guccagaucugaugaggccguuaggccgaawgauggua

SEQ ID NO: 5888 - RNA, 38 nt, Artificial Sequence
  Description of Artificial Sequence:  Enzymatic Nucleic Acid
gguccagacugaugaggccguuaggccgaawggauggu

SEQ ID NO: 5889 - RNA, 38 nt, Artificial Sequence
  Description of Artificial Sequence:  Enzymatic Nucleic Acid
gccggucccugaugaggccguuaggccgaawaugggau

SEQ ID NO: 5890 - RNA, 38 nt, Artificial Sequence
  Description of Artificial Sequence:  Enzymatic Nucleic Acid
gcccugcccugaugaggccguuaggccgaawuccagau

SEQ ID NO: 5891 - RNA, 38 nt, Artificial Sequence
  Description of Artificial Sequence:  Enzymatic Nucleic Acid
gguggccccugaugaggccguuaggccgaawccggucc

SEQ ID NO: 5892 - RNA, 38 nt, Artificial Sequence
  Description of Artificial Sequence:  Enzymatic Nucleic Acid
ucaucggucugaugaggccguuaggccgaawcccugcc

SEQ ID NO: 5893 - RNA, 38 nt, Artificial Sequence
  Description of Artificial Sequence:  Enzymatic Nucleic Acid
cucaucggcugaugaggccguuaggccgaawgcccugc

SEQ ID NO: 5894 - RNA, 38 nt, Artificial Sequence
  Description of Artificial Sequence:  Enzymatic Nucleic Acid
uccucauccugaugaggccguuaggccgaawuggcccu

SEQ ID NO: 5895 - RNA, 38 nt, Artificial Sequence
  Description of Artificial Sequence:  Enzymatic Nucleic Acid
gccccagccugaugaggccguuaggccgaawcuccuca

SEQ ID NO: 5896 - RNA, 38 nt, Artificial Sequence
  Description of Artificial Sequence:  Enzymatic Nucleic Acid
gaagcccccugaugaggccguuaggccgaawcggcucc

SEQ ID NO: 5897 - RNA, 38 nt, Artificial Sequence
  Description of Artificial Sequence:  Enzymatic Nucleic Acid
acuugggacugaugaggccguuaggccgaawccccagc

SEQ ID NO: 5898 - RNA, 38 nt, Artificial Sequence
  Description of Artificial Sequence:  Enzymatic Nucleic Acid
agcacuugcugaugaggccguuaggccgaawaagcccc

SEQ ID NO: 5899 - RNA, 38 nt, Artificial Sequence
  Description of Artificial Sequence:  Enzymatic Nucleic Acid
cagcacuucugaugaggccguuaggccgaawgaagccc

SEQ ID NO: 5900 - RNA, 38 nt, Artificial Sequence
  Description of Artificial Sequence:  Enzymatic Nucleic Acid
gcagcacucugaugaggccguuaggccgaawggaagcc

SEQ ID NO: 5901 - RNA, 38 nt, Artificial Sequence
  Description of Artificial Sequence:  Enzymatic Nucleic Acid
uggcuggccugaugaggccguuaggccgaawcacuugg

SEQ ID NO: 5902 - RNA, 38 nt, Artificial Sequence
  Description of Artificial Sequence:  Enzymatic Nucleic Acid
aucuggcucugaugaggccguuaggccgaawcagcacu

SEQ ID NO: 5903 - RNA, 38 nt, Artificial Sequence
  Description of Artificial Sequence:  Enzymatic Nucleic Acid
caucuggccugaugaggccguuaggccgaawgcagcac

SEQ ID NO: 5904 - RNA, 38 nt, Artificial Sequence
  Description of Artificial Sequence:  Enzymatic Nucleic Acid
cggcaucucugaugaggccguuaggccgaawcuggcag

SEQ ID NO: 5905 - RNA, 38 nt, Artificial Sequence
  Description of Artificial Sequence:  Enzymatic Nucleic Acid
gcggcauccugaugaggccguuaggccgaawgcuggca

SEQ ID NO: 5906 - RNA, 38 nt, Artificial Sequence
  Description of Artificial Sequence:  Enzymatic Nucleic Acid
uugucagccugaugaggccguuaggccgaawcaucugg

SEQ ID NO: 5907 - RNA, 38 nt, Artificial Sequence
  Description of Artificial Sequence:  Enzymatic Nucleic Acid
gccuuguccugaugaggccguuaggccgaawcggcauc

SEQ ID NO: 5908 - RNA, 38 nt, Artificial Sequence
  Description of Artificial Sequence:  Enzymatic Nucleic Acid
ugaggccucugaugaggccguuaggccgaawucagcgg

SEQ ID NO: 5909 - RNA, 38 nt, Artificial Sequence
  Description of Artificial Sequence:  Enzymatic Nucleic Acid
aguacugacugaugaggccguuaggccgaawccuuguc

SEQ ID NO: 5910 - RNA, 38 nt, Artificial Sequence
  Description of Artificial Sequence:  Enzymatic Nucleic Acid
caguacugcugaugaggccguuaggccgaawgccuugu

SEQ ID NO: 5911 - RNA, 38 nt, Artificial Sequence
  Description of Artificial Sequence:  Enzymatic Nucleic Acid
uccaguaccugaugaggccguuaggccgaawaggccuu

SEQ ID NO: 5912 - RNA, 38 nt, Artificial Sequence
  Description of Artificial Sequence:  Enzymatic Nucleic Acid
caggcucccugaugaggccguuaggccgaawuacugag

SEQ ID NO: 5913 - RNA, 38 nt, Artificial Sequence
  Description of Artificial Sequence:  Enzymatic Nucleic Acid
gucuuccacugaugaggccguuaggccgaawcuccagu

SEQ ID NO: 5914 - RNA, 38 nt, Artificial Sequence
  Description of Artificial Sequence:  Enzymatic Nucleic Acid
ggucuucccugaugaggccguuaggccgaawgcuccag

SEQ ID NO: 5915 - RNA, 38 nt, Artificial Sequence
  Description of Artificial Sequence:  Enzymatic Nucleic Acid
ccgaagcucugaugaggccguuaggccgaawucuucca

SEQ ID NO: 5916 - RNA, 38 nt, Artificial Sequence
  Description of Artificial Sequence:  Enzymatic Nucleic Acid
gccgaagccugaugaggccguuaggccgaawgucuucc

SEQ ID NO: 5917 - RNA, 38 nt, Artificial Sequence
  Description of Artificial Sequence:  Enzymatic Nucleic Acid
ccugccgacugaugaggccguuaggccgaawcuggucu

SEQ ID NO: 5918 - RNA, 38 nt, Artificial Sequence
  Description of Artificial Sequence:  Enzymatic Nucleic Acid
gcauugcccugaugaggccguuaggccgaawccgaagc

SEQ ID NO: 5919 - RNA, 38 nt, Artificial Sequence
  Description of Artificial Sequence:  Enzymatic Nucleic Acid
cagcgcaucugaugaggccguuaggccgaawccugccg

SEQ ID NO: 5920 - RNA, 38 nt, Artificial Sequence
  Description of Artificial Sequence:  Enzymatic Nucleic Acid
gucccuuccugaugaggccguuaggccgaawcgcauug

SEQ ID NO: 5921 - RNA, 38 nt, Artificial Sequence
  Description of Artificial Sequence:  Enzymatic Nucleic Acid
caccgggccugaugaggccguuaggccgaawcacgcgu

SEQ ID NO: 5922 - RNA, 38 nt, Artificial Sequence
  Description of Artificial Sequence:  Enzymatic Nucleic Acid
ugucaccgcugaugaggccguuaggccgaawcggcacg

SEQ ID NO: 5923 - RNA, 38 nt, Artificial Sequence
  Description of Artificial Sequence:  Enzymatic Nucleic Acid
cugucacccugaugaggccguuaggccgaawgcggcac

SEQ ID NO: 5924 - RNA, 38 nt, Artificial Sequence
  Description of Artificial Sequence:  Enzymatic Nucleic Acid
cggcgggccugaugaggccguuaggccgaawucaccgg

SEQ ID NO: 5925 - RNA, 38 nt, Artificial Sequence
  Description of Artificial Sequence:  Enzymatic Nucleic Acid
gcccggcgcugaugaggccguuaggccgaawcugucac

SEQ ID NO: 5926 - RNA, 38 nt, Artificial Sequence
  Description of Artificial Sequence:  Enzymatic Nucleic Acid
ugcccggccugaugaggccguuaggccgaawgcuguca

SEQ ID NO: 5927 - RNA, 38 nt, Artificial Sequence
  Description of Artificial Sequence:  Enzymatic Nucleic Acid
cguugccccugaugaggccguuaggccgaawcgggcug

SEQ ID NO: 5928 - RNA, 38 nt, Artificial Sequence
  Description of Artificial Sequence:  Enzymatic Nucleic Acid
agagccgucugaugaggccguuaggccgaawcccggcg

SEQ ID NO: 5929 - RNA, 38 nt, Artificial Sequence
  Description of Artificial Sequence:  Enzymatic Nucleic Acid
ugggccagcugaugaggccguuaggccgaawccguugc

SEQ ID NO: 5930 - RNA, 38 nt, Artificial Sequence
  Description of Artificial Sequence:  Enzymatic Nucleic Acid
cgugggcccugaugaggccguuaggccgaawagccguu

SEQ ID NO: 5931 - RNA, 38 nt, Artificial Sequence
  Description of Artificial Sequence:  Enzymatic Nucleic Acid
gugccgugcugaugaggccguuaggccgaawccagagc

SEQ ID NO: 5932 - RNA, 38 nt, Artificial Sequence
  Description of Artificial Sequence:  Enzymatic Nucleic Acid
ugugccgucugaugaggccguuaggccgaawgccagag

SEQ ID NO: 5933 - RNA, 38 nt, Artificial Sequence
  Description of Artificial Sequence:  Enzymatic Nucleic Acid
augugccgcugaugaggccguuaggccgaawggccaga

SEQ ID NO: 5934 - RNA, 38 nt, Artificial Sequence
  Description of Artificial Sequence:  Enzymatic Nucleic Acid
cauugaugcugaugaggccguuaggccgaawccguggg

SEQ ID NO: 5935 - RNA, 38 nt, Artificial Sequence
  Description of Artificial Sequence:  Enzymatic Nucleic Acid
gucauugacugaugaggccguuaggccgaawugccgug

SEQ ID NO: 5936 - RNA, 38 nt, Artificial Sequence
  Description of Artificial Sequence:  Enzymatic Nucleic Acid
ugagucaucugaugaggccguuaggccgaawaugugcc

SEQ ID NO: 5937 - RNA, 38 nt, Artificial Sequence
  Description of Artificial Sequence:  Enzymatic Nucleic Acid
aaagggugcugaugaggccguuaggccgaawucauuga

SEQ ID NO: 5938 - RNA, 38 nt, Artificial Sequence
  Description of Artificial Sequence:  Enzymatic Nucleic Acid
ccaaagggcugaugaggccguuaggccgaawagucauu

SEQ ID NO: 5939 - RNA, 38 nt, Artificial Sequence
  Description of Artificial Sequence:  Enzymatic Nucleic Acid
ucccaaagcugaugaggccguuaggccgaawugaguca

SEQ ID NO: 5940 - RNA, 38 nt, Artificial Sequence
  Description of Artificial Sequence:  Enzymatic Nucleic Acid
gucccaaacugaugaggccguuaggccgaawgugaguc

SEQ ID NO: 5941 - RNA, 38 nt, Artificial Sequence
  Description of Artificial Sequence:  Enzymatic Nucleic Acid
agucccaacugaugaggccguuaggccgaawggugagu

SEQ ID NO: 5942 - RNA, 38 nt, Artificial Sequence
  Description of Artificial Sequence:  Enzymatic Nucleic Acid
ccaggcagcugaugaggccguuaggccgaawucccaaa

SEQ ID NO: 5943 - RNA, 38 nt, Artificial Sequence
  Description of Artificial Sequence:  Enzymatic Nucleic Acid
agccaggccugaugaggccguuaggccgaawaguccca

SEQ ID NO: 5944 - RNA, 38 nt, Artificial Sequence
  Description of Artificial Sequence:  Enzymatic Nucleic Acid
cagagccacugaugaggccguuaggccgaawcagaguc

SEQ ID NO: 5945 - RNA, 38 nt, Artificial Sequence
  Description of Artificial Sequence:  Enzymatic Nucleic Acid
gcagagcccugaugaggccguuaggccgaawgcagagu

SEQ ID NO: 5946 - RNA, 38 nt, Artificial Sequence
  Description of Artificial Sequence:  Enzymatic Nucleic Acid
cucagcagcugaugaggccguuaggccgaawccaggca

SEQ ID NO: 5947 - RNA, 38 nt, Artificial Sequence
  Description of Artificial Sequence:  Enzymatic Nucleic Acid
ggcucagccugaugaggccguuaggccgaawagccagg

SEQ ID NO: 5948 - RNA, 38 nt, Artificial Sequence
  Description of Artificial Sequence:  Enzymatic Nucleic Acid
gggggcuccugaugaggccguuaggccgaawcagagcc

SEQ ID NO: 5949 - RNA, 38 nt, Artificial Sequence
  Description of Artificial Sequence:  Enzymatic Nucleic Acid
ugagcgggcugaugaggccguuaggccgaawcucagca

SEQ ID NO: 5950 - RNA, 38 nt, Artificial Sequence
  Description of Artificial Sequence:  Enzymatic Nucleic Acid
gugagcggcugaugaggccguuaggccgaawgcucagc

SEQ ID NO: 5951 - RNA, 38 nt, Artificial Sequence
  Description of Artificial Sequence:  Enzymatic Nucleic Acid
agugagcgcugaugaggccguuaggccgaawggcucag

SEQ ID NO: 5952 - RNA, 38 nt, Artificial Sequence
  Description of Artificial Sequence:  Enzymatic Nucleic Acid
cagugagccugaugaggccguuaggccgaawgggcuca

SEQ ID NO: 5953 - RNA, 38 nt, Artificial Sequence
  Description of Artificial Sequence:  Enzymatic Nucleic Acid
cugcagugcugaugaggccguuaggccgaawcgggggc

SEQ ID NO: 5954 - RNA, 38 nt, Artificial Sequence
  Description of Artificial Sequence:  Enzymatic Nucleic Acid
cacugcagcugaugaggccguuaggccgaawagcgggg

SEQ ID NO: 5955 - RNA, 38 nt, Artificial Sequence
  Description of Artificial Sequence:  Enzymatic Nucleic Acid
cgcacugccugaugaggccguuaggccgaawugagcgg

SEQ ID NO: 5956 - RNA, 38 nt, Artificial Sequence
  Description of Artificial Sequence:  Enzymatic Nucleic Acid
ggccgcaccugaugaggccguuaggccgaawcagugag

SEQ ID NO: 5957 - RNA, 38 nt, Artificial Sequence
  Description of Artificial Sequence:  Enzymatic Nucleic Acid
agcccucgcugaugaggccguuaggccgaawccgcacu

SEQ ID NO: 5958 - RNA, 38 nt, Artificial Sequence
  Description of Artificial Sequence:  Enzymatic Nucleic Acid
gagcccuccugaugaggccguuaggccgaawgccgcac

SEQ ID NO: 5959 - RNA, 38 nt, Artificial Sequence
  Description of Artificial Sequence:  Enzymatic Nucleic Acid
uggcucggcugaugaggccguuaggccgaawcccucgg

SEQ ID NO: 5960 - RNA, 38 nt, Artificial Sequence
  Description of Artificial Sequence:  Enzymatic Nucleic Acid
gguggcuccugaugaggccguuaggccgaawagcccuc

SEQ ID NO: 5961 - RNA, 38 nt, Artificial Sequence
  Description of Artificial Sequence:  Enzymatic Nucleic Acid
acccuggucugaugaggccguuaggccgaawcucggag

SEQ ID NO: 5962 - RNA, 38 nt, Artificial Sequence
  Description of Artificial Sequence:  Enzymatic Nucleic Acid
aacccuggcugaugaggccguuaggccgaawgcucgga

SEQ ID NO: 5963 - RNA, 38 nt, Artificial Sequence
  Description of Artificial Sequence:  Enzymatic Nucleic Acid
ggaacccucugaugaggccguuaggccgaawuggcucg

SEQ ID NO: 5964 - RNA, 38 nt, Artificial Sequence
  Description of Artificial Sequence:  Enzymatic Nucleic Acid
gggaaccccugaugaggccguuaggccgaawguggcuc

SEQ ID NO: 5965 - RNA, 38 nt, Artificial Sequence
  Description of Artificial Sequence:  Enzymatic Nucleic Acid
cgagguggcugaugaggccguuaggccgaawaacccug

SEQ ID NO: 5966 - RNA, 38 nt, Artificial Sequence
  Description of Artificial Sequence:  Enzymatic Nucleic Acid
ccgaggugcugaugaggccguuaggccgaawgaacccu

SEQ ID NO: 5967 - RNA, 38 nt, Artificial Sequence
  Description of Artificial Sequence:  Enzymatic Nucleic Acid
cccgaggucugaugaggccguuaggccgaawggaaccc

SEQ ID NO: 5968 - RNA, 38 nt, Artificial Sequence
  Description of Artificial Sequence:  Enzymatic Nucleic Acid
gcccgaggcugaugaggccguuaggccgaawgggaacc

SEQ ID NO: 5969 - RNA, 38 nt, Artificial Sequence
  Description of Artificial Sequence:  Enzymatic Nucleic Acid
gggcccgacugaugaggccguuaggccgaawuggggaa

SEQ ID NO: 5970 - RNA, 38 nt, Artificial Sequence
  Description of Artificial Sequence:  Enzymatic Nucleic Acid
agggcccgcugaugaggccguuaggccgaawgugggga

SEQ ID NO: 5971 - RNA, 38 nt, Artificial Sequence
  Description of Artificial Sequence:  Enzymatic Nucleic Acid
ccggcgagcugaugaggccguuaggccgaawcccgagg

SEQ ID NO: 5972 - RNA, 38 nt, Artificial Sequence
  Description of Artificial Sequence:  Enzymatic Nucleic Acid
uccggcgacugaugaggccguuaggccgaawgcccgag

SEQ ID NO: 5973 - RNA, 38 nt, Artificial Sequence
  Description of Artificial Sequence:  Enzymatic Nucleic Acid
cuccggcgcugaugaggccguuaggccgaawggcccga

SEQ ID NO: 5974 - RNA, 38 nt, Artificial Sequence
  Description of Artificial Sequence:  Enzymatic Nucleic Acid
uggccucccugaugaggccguuaggccgaawcgagggc

SEQ ID NO: 5975 - RNA, 38 nt, Artificial Sequence
  Description of Artificial Sequence:  Enzymatic Nucleic Acid
aacagccucugaugaggccguuaggccgaawccuccgg

SEQ ID NO: 5976 - RNA, 38 nt, Artificial Sequence
  Description of Artificial Sequence:  Enzymatic Nucleic Acid
gaacagcccugaugaggccguuaggccgaawgccuccg

SEQ ID NO: 5977 - RNA, 38 nt, Artificial Sequence
  Description of Artificial Sequence:  Enzymatic Nucleic Acid
gcgugaaccugaugaggccguuaggccgaawccuggcc

SEQ ID NO: 5978 - RNA, 38 nt, Artificial Sequence
  Description of Artificial Sequence:  Enzymatic Nucleic Acid
uucuugcgcugaugaggccguuaggccgaawaacagcc

SEQ ID NO: 5979 - RNA, 38 nt, Artificial Sequence
  Description of Artificial Sequence:  Enzymatic Nucleic Acid
gcgguucucugaugaggccguuaggccgaawcgugaac

SEQ ID NO: 5980 - RNA, 38 nt, Artificial Sequence
  Description of Artificial Sequence:  Enzymatic Nucleic Acid
gcgggugccugaugaggccguuaggccgaawuucuugc

SEQ ID NO: 5981 - RNA, 38 nt, Artificial Sequence
  Description of Artificial Sequence:  Enzymatic Nucleic Acid
gcugcgggcugaugaggccguuaggccgaawcgguucu

SEQ ID NO: 5982 - RNA, 38 nt, Artificial Sequence
  Description of Artificial Sequence:  Enzymatic Nucleic Acid
uggcugcgcugaugaggccguuaggccgaawugcgguu

SEQ ID NO: 5983 - RNA, 38 nt, Artificial Sequence
  Description of Artificial Sequence:  Enzymatic Nucleic Acid
guggcugccugaugaggccguuaggccgaawgugcggu

SEQ ID NO: 5984 - RNA, 38 nt, Artificial Sequence
  Description of Artificial Sequence:  Enzymatic Nucleic Acid
gcaguggccugaugaggccguuaggccgaawcgggugc

SEQ ID NO: 5985 - RNA, 38 nt, Artificial Sequence
  Description of Artificial Sequence:  Enzymatic Nucleic Acid
acggcagucugaugaggccguuaggccgaawcugcggg

SEQ ID NO: 5986 - RNA, 38 nt, Artificial Sequence
  Description of Artificial Sequence:  Enzymatic Nucleic Acid
gacggcagcugaugaggccguuaggccgaawgcugcgg

SEQ ID NO: 5987 - RNA, 38 nt, Artificial Sequence
  Description of Artificial Sequence:  Enzymatic Nucleic Acid
cagacggccugaugaggccguuaggccgaawuggcugc

SEQ ID NO: 5988 - RNA, 38 nt, Artificial Sequence
  Description of Artificial Sequence:  Enzymatic Nucleic Acid
gcccagaccugaugaggccguuaggccgaawcaguggc

SEQ ID NO: 5989 - RNA, 38 nt, Artificial Sequence
  Description of Artificial Sequence:  Enzymatic Nucleic Acid
ccuggccccugaugaggccguuaggccgaawacggcag

SEQ ID NO: 5990 - RNA, 38 nt, Artificial Sequence
  Description of Artificial Sequence:  Enzymatic Nucleic Acid
gccugccucugaugaggccguuaggccgaawcccagac

SEQ ID NO: 5991 - RNA, 38 nt, Artificial Sequence
  Description of Artificial Sequence:  Enzymatic Nucleic Acid
ugccugcccugaugaggccguuaggccgaawgcccaga

SEQ ID NO: 5992 - RNA, 38 nt, Artificial Sequence
  Description of Artificial Sequence:  Enzymatic Nucleic Acid
ccgcugcccugaugaggccguuaggccgaawccuggcc

SEQ ID NO: 5993 - RNA, 38 nt, Artificial Sequence
  Description of Artificial Sequence:  Enzymatic Nucleic Acid
acccccgccugaugaggccguuaggccgaawccugccu

SEQ ID NO: 5994 - RNA, 38 nt, Artificial Sequence
  Description of Artificial Sequence:  Enzymatic Nucleic Acid
gagucacccugaugaggccguuaggccgaawucccgcc

SEQ ID NO: 5995 - RNA, 38 nt, Artificial Sequence
  Description of Artificial Sequence:  Enzymatic Nucleic Acid
gccuucugcugaugaggccguuaggccgaawucaccag

SEQ ID NO: 5996 - RNA, 38 nt, Artificial Sequence
  Description of Artificial Sequence:  Enzymatic Nucleic Acid
gagccuuccugaugaggccguuaggccgaawagucacc

SEQ ID NO: 5997 - RNA, 38 nt, Artificial Sequence
  Description of Artificial Sequence:  Enzymatic Nucleic Acid
ggcaccugcugaugaggccguuaggccgaawccuucug

SEQ ID NO: 5998 - RNA, 38 nt, Artificial Sequence
  Description of Artificial Sequence:  Enzymatic Nucleic Acid
agggcacccugaugaggccguuaggccgaawagccuuc

SEQ ID NO: 5999 - RNA, 38 nt, Artificial Sequence
  Description of Artificial Sequence:  Enzymatic Nucleic Acid
cuggguagcugaugaggccguuaggccgaawcaccuga

SEQ ID NO: 6000 - RNA, 38 nt, Artificial Sequence
  Description of Artificial Sequence:  Enzymatic Nucleic Acid
gcuggguacugaugaggccguuaggccgaawgcaccug

SEQ ID NO: 6001 - RNA, 38 nt, Artificial Sequence
  Description of Artificial Sequence:  Enzymatic Nucleic Acid
ggcugggucugaugaggccguuaggccgaawggcaccu

SEQ ID NO: 6002 - RNA, 38 nt, Artificial Sequence
  Description of Artificial Sequence:  Enzymatic Nucleic Acid
ugaggcugcugaugaggccguuaggccgaawuagggca

SEQ ID NO: 6003 - RNA, 38 nt, Artificial Sequence
  Description of Artificial Sequence:  Enzymatic Nucleic Acid
gugaggcucugaugaggccguuaggccgaawguagggc

SEQ ID NO: 6004 - RNA, 38 nt, Artificial Sequence
  Description of Artificial Sequence:  Enzymatic Nucleic Acid
ggugaggccugaugaggccguuaggccgaawgguaggg

SEQ ID NO: 6005 - RNA, 38 nt, Artificial Sequence
  Description of Artificial Sequence:  Enzymatic Nucleic Acid
gcaggugacugaugaggccguuaggccgaawcugggua

SEQ ID NO: 6006 - RNA, 38 nt, Artificial Sequence
  Description of Artificial Sequence:  Enzymatic Nucleic Acid
ugcaggugcugaugaggccguuaggccgaawgcugggu

SEQ ID NO: 6007 - RNA, 38 nt, Artificial Sequence
  Description of Artificial Sequence:  Enzymatic Nucleic Acid
gcugcaggcugaugaggccguuaggccgaawaggcugg

SEQ ID NO: 6008 - RNA, 38 nt, Artificial Sequence
  Description of Artificial Sequence:  Enzymatic Nucleic Acid
aggcugcacugaugaggccguuaggccgaawugaggcu

SEQ ID NO: 6009 - RNA, 38 nt, Artificial Sequence
  Description of Artificial Sequence:  Enzymatic Nucleic Acid
gaggcugccugaugaggccguuaggccgaawgugaggc

SEQ ID NO: 6010 - RNA, 38 nt, Artificial Sequence
  Description of Artificial Sequence:  Enzymatic Nucleic Acid
ggugaggccugaugaggccguuaggccgaawcagguga

SEQ ID NO: 6011 - RNA, 38 nt, Artificial Sequence
  Description of Artificial Sequence:  Enzymatic Nucleic Acid
gggggugacugaugaggccguuaggccgaawcugcagg

SEQ ID NO: 6012 - RNA, 38 nt, Artificial Sequence
  Description of Artificial Sequence:  Enzymatic Nucleic Acid
ggggggugcugaugaggccguuaggccgaawgcugcag

SEQ ID NO: 6013 - RNA, 38 nt, Artificial Sequence
  Description of Artificial Sequence:  Enzymatic Nucleic Acid
caggggggcugaugaggccguuaggccgaawaggcugc

SEQ ID NO: 6014 - RNA, 38 nt, Artificial Sequence
  Description of Artificial Sequence:  Enzymatic Nucleic Acid
cccaggggcugaugaggccguuaggccgaawugaggcu

SEQ ID NO: 6015 - RNA, 38 nt, Artificial Sequence
  Description of Artificial Sequence:  Enzymatic Nucleic Acid
gcccagggcugaugaggccguuaggccgaawgugaggc

SEQ ID NO: 6016 - RNA, 38 nt, Artificial Sequence
  Description of Artificial Sequence:  Enzymatic Nucleic Acid
ggcccaggcugaugaggccguuaggccgaawggugagg

SEQ ID NO: 6017 - RNA, 38 nt, Artificial Sequence
  Description of Artificial Sequence:  Enzymatic Nucleic Acid
aggcccagcugaugaggccguuaggccgaawgggugag

SEQ ID NO: 6018 - RNA, 38 nt, Artificial Sequence
  Description of Artificial Sequence:  Enzymatic Nucleic Acid
caggcccacugaugaggccguuaggccgaawgggguga

SEQ ID NO: 6019 - RNA, 38 nt, Artificial Sequence
  Description of Artificial Sequence:  Enzymatic Nucleic Acid
ccaggccccugaugaggccguuaggccgaawgggggug

SEQ ID NO: 6020 - RNA, 38 nt, Artificial Sequence
  Description of Artificial Sequence:  Enzymatic Nucleic Acid
cagcgccacugaugaggccguuaggccgaawcccaggg

SEQ ID NO: 6021 - RNA, 38 nt, Artificial Sequence
  Description of Artificial Sequence:  Enzymatic Nucleic Acid
ccagcgcccugaugaggccguuaggccgaawgcccagg

SEQ ID NO: 6022 - RNA, 38 nt, Artificial Sequence
  Description of Artificial Sequence:  Enzymatic Nucleic Acid
acagcacccugaugaggccguuaggccgaawcgccagg

SEQ ID NO: 6023 - RNA, 38 nt, Artificial Sequence
  Description of Artificial Sequence:  Enzymatic Nucleic Acid
cuguccaccugaugaggccguuaggccgaawcaccagc

SEQ ID NO: 6024 - RNA, 38 nt, Artificial Sequence
  Description of Artificial Sequence:  Enzymatic Nucleic Acid
ccaagcaccugaugaggccguuaggccgaawuccacag

SEQ ID NO: 6025 - RNA, 38 nt, Artificial Sequence
  Description of Artificial Sequence:  Enzymatic Nucleic Acid
agggcccacugaugaggccguuaggccgaawcacuguc

SEQ ID NO: 6026 - RNA, 38 nt, Artificial Sequence
  Description of Artificial Sequence:  Enzymatic Nucleic Acid
gucagcagcugaugaggccguuaggccgaawcccaagc

SEQ ID NO: 6027 - RNA, 38 nt, Artificial Sequence
  Description of Artificial Sequence:  Enzymatic Nucleic Acid
ggucagcacugaugaggccguuaggccgaawgcccaag

SEQ ID NO: 6028 - RNA, 38 nt, Artificial Sequence
  Description of Artificial Sequence:  Enzymatic Nucleic Acid
gggucagccugaugaggccguuaggccgaawggcccaa

SEQ ID NO: 6029 - RNA, 38 nt, Artificial Sequence
  Description of Artificial Sequence:  Enzymatic Nucleic Acid
uggggguccugaugaggccguuaggccgaawcagggcc

SEQ ID NO: 6030 - RNA, 37 nt, Artificial Sequence
  Description of Artificial Sequence:  Enzymatic Nucleic Acid
agcggacggccgaaaggcgagugaggucuccucuuca

SEQ ID NO: 6031 - RNA, 37 nt, Artificial Sequence
  Description of Artificial Sequence:  Enzymatic Nucleic Acid
ccagcggagccgaaaggcgagugaggucugcccucuu

SEQ ID NO: 6032 - RNA, 37 nt, Artificial Sequence
  Description of Artificial Sequence:  Enzymatic Nucleic Acid
cccuccaggccgaaaggcgagugaggucuggacgccc

SEQ ID NO: 6033 - RNA, 37 nt, Artificial Sequence
  Description of Artificial Sequence:  Enzymatic Nucleic Acid
gcagccgggccgaaaggcgagugaggucuucccucca

SEQ ID NO: 6034 - RNA, 37 nt, Artificial Sequence
  Description of Artificial Sequence:  Enzymatic Nucleic Acid
gccagcaggccgaaaggcgagugaggucucggcuccc

SEQ ID NO: 6035 - RNA, 37 nt, Artificial Sequence
  Description of Artificial Sequence:  Enzymatic Nucleic Acid
caugccaggccgaaaggcgagugaggucuagccggcu

SEQ ID NO: 6036 - RNA, 37 nt, Artificial Sequence
  Description of Artificial Sequence:  Enzymatic Nucleic Acid
cacccauggccgaaaggcgagugaggucucagcagcc

SEQ ID NO: 6037 - RNA, 37 nt, Artificial Sequence
  Description of Artificial Sequence:  Enzymatic Nucleic Acid
ccacagcagccgaaaggcgagugaggucuccaugcca

SEQ ID NO: 6038 - RNA, 37 nt, Artificial Sequence
  Description of Artificial Sequence:  Enzymatic Nucleic Acid
agccacaggccgaaaggcgagugaggucuacccaugc

SEQ ID NO: 6039 - RNA, 37 nt, Artificial Sequence
  Description of Artificial Sequence:  Enzymatic Nucleic Acid
ugcagccagccgaaaggcgagugaggucuagcaccca

SEQ ID NO: 6040 - RNA, 37 nt, Artificial Sequence
  Description of Artificial Sequence:  Enzymatic Nucleic Acid
gccugcaggccgaaaggcgagugaggucucacagcac

SEQ ID NO: 6041 - RNA, 37 nt, Artificial Sequence
  Description of Artificial Sequence:  Enzymatic Nucleic Acid
caggccuggccgaaaggcgagugaggucuagccacag

SEQ ID NO: 6042 - RNA, 37 nt, Artificial Sequence
  Description of Artificial Sequence:  Enzymatic Nucleic Acid
cugccagggccgaaaggcgagugaggucucugcagcc

SEQ ID NO: 6043 - RNA, 37 nt, Artificial Sequence
  Description of Artificial Sequence:  Enzymatic Nucleic Acid
gccaccuggccgaaaggcgagugaggucucaggccug

SEQ ID NO: 6044 - RNA, 37 nt, Artificial Sequence
  Description of Artificial Sequence:  Enzymatic Nucleic Acid
ggcugccagccgaaaggcgagugaggucucugccagg

SEQ ID NO: 6045 - RNA, 37 nt, Artificial Sequence
  Description of Artificial Sequence:  Enzymatic Nucleic Acid
uggggcuggccgaaaggcgagugaggucucaccugcc

SEQ ID NO: 6046 - RNA, 37 nt, Artificial Sequence
  Description of Artificial Sequence:  Enzymatic Nucleic Acid
gcaugggggccgaaaggcgagugaggucuugccaccu

SEQ ID NO: 6047 - RNA, 37 nt, Artificial Sequence
  Description of Artificial Sequence:  Enzymatic Nucleic Acid
caccuggggccgaaaggcgagugaggucuauggggcu

SEQ ID NO: 6048 - RNA, 37 nt, Artificial Sequence
  Description of Artificial Sequence:  Enzymatic Nucleic Acid
cgcaggcagccgaaaggcgagugaggucucugggcau

SEQ ID NO: 6049 - RNA, 37 nt, Artificial Sequence
  Description of Artificial Sequence:  Enzymatic Nucleic Acid
uacgcagggccgaaaggcgagugaggucuaccugggc

SEQ ID NO: 6050 - RNA, 37 nt, Artificial Sequence
  Description of Artificial Sequence:  Enzymatic Nucleic Acid
agcauacggccgaaaggcgagugaggucuaggcaccu

SEQ ID NO: 6051 - RNA, 37 nt, Artificial Sequence
  Description of Artificial Sequence:  Enzymatic Nucleic Acid
guagcauagccgaaaggcgagugaggucugcaggcac

SEQ ID NO: 6052 - RNA, 37 nt, Artificial Sequence
  Description of Artificial Sequence:  Enzymatic Nucleic Acid
cauuguaggccgaaaggcgagugaggucuauacgcag

SEQ ID NO: 6053 - RNA, 37 nt, Artificial Sequence
  Description of Artificial Sequence:  Enzymatic Nucleic Acid
accuuggggccgaaaggcgagugaggucuucauugua

SEQ ID NO: 6054 - RNA, 37 nt, Artificial Sequence
  Description of Artificial Sequence:  Enzymatic Nucleic Acid
ugucgucagccgaaaggcgagugaggucucuugggcu

SEQ ID NO: 6055 - RNA, 37 nt, Artificial Sequence
  Description of Artificial Sequence:  Enzymatic Nucleic Acid
gggggcaggccgaaaggcgagugaggucuuugucguc

SEQ ID NO: 6056 - RNA, 37 nt, Artificial Sequence
  Description of Artificial Sequence:  Enzymatic Nucleic Acid
gcuggggggccgaaaggcgagugaggucuagcuuguc

SEQ ID NO: 6057 - RNA, 37 nt, Artificial Sequence
  Description of Artificial Sequence:  Enzymatic Nucleic Acid
aggcccuggccgaaaggcgagugaggucuugggggca

SEQ ID NO: 6058 - RNA, 37 nt, Artificial Sequence
  Description of Artificial Sequence:  Enzymatic Nucleic Acid
ccugcagggccgaaaggcgagugaggucuccugcugg

SEQ ID NO: 6059 - RNA, 37 nt, Artificial Sequence
  Description of Artificial Sequence:  Enzymatic Nucleic Acid
acagccuggccgaaaggcgagugaggucuaggcccug

SEQ ID NO: 6060 - RNA, 37 nt, Artificial Sequence
  Description of Artificial Sequence:  Enzymatic Nucleic Acid
gggcacaggccgaaaggcgagugaggucucugcaggc

SEQ ID NO: 6061 - RNA, 37 nt, Artificial Sequence
  Description of Artificial Sequence:  Enzymatic Nucleic Acid
cacgggcagccgaaaggcgagugaggucuagccugca

SEQ ID NO: 6062 - RNA, 37 nt, Artificial Sequence
  Description of Artificial Sequence:  Enzymatic Nucleic Acid
cccacggggccgaaaggcgagugaggucuacagccug

SEQ ID NO: 6063 - RNA, 37 nt, Artificial Sequence
  Description of Artificial Sequence:  Enzymatic Nucleic Acid
gaugcccagccgaaaggcgagugaggucugggcacag

SEQ ID NO: 6064 - RNA, 37 nt, Artificial Sequence
  Description of Artificial Sequence:  Enzymatic Nucleic Acid
cagggauggccgaaaggcgagugaggucuccacgggc

SEQ ID NO: 6065 - RNA, 37 nt, Artificial Sequence
  Description of Artificial Sequence:  Enzymatic Nucleic Acid
gcuggcaggccgaaaggcgagugaggucuagggaugc

SEQ ID NO: 6066 - RNA, 37 nt, Artificial Sequence
  Description of Artificial Sequence:  Enzymatic Nucleic Acid
cuggcugggccgaaaggcgagugaggucuagcaggga

SEQ ID NO: 6067 - RNA, 37 nt, Artificial Sequence
  Description of Artificial Sequence:  Enzymatic Nucleic Acid
ugcgcugggccgaaaggcgagugaggucuuggcagca

SEQ ID NO: 6068 - RNA, 37 nt, Artificial Sequence
  Description of Artificial Sequence:  Enzymatic Nucleic Acid
aagaugcggccgaaaggcgagugaggucuuggcuggc

SEQ ID NO: 6069 - RNA, 37 nt, Artificial Sequence
  Description of Artificial Sequence:  Enzymatic Nucleic Acid
ggaagauggccgaaaggcgagugaggucugcuggcug

SEQ ID NO: 6070 - RNA, 37 nt, Artificial Sequence
  Description of Artificial Sequence:  Enzymatic Nucleic Acid
uugccguggccgaaaggcgagugaggucuaggaagau

SEQ ID NO: 6071 - RNA, 37 nt, Artificial Sequence
  Description of Artificial Sequence:  Enzymatic Nucleic Acid
ugcgguuggccgaaaggcgagugaggucucgugcagg

SEQ ID NO: 6072 - RNA, 37 nt, Artificial Sequence
  Description of Artificial Sequence:  Enzymatic Nucleic Acid
gcgagauggccgaaaggcgagugaggucugguugccg

SEQ ID NO: 6073 - RNA, 37 nt, Artificial Sequence
  Description of Artificial Sequence:  Enzymatic Nucleic Acid
ggcacauggccgaaaggcgagugaggucugagaugcg

SEQ ID NO: 6074 - RNA, 37 nt, Artificial Sequence
  Description of Artificial Sequence:  Enzymatic Nucleic Acid
agcuggcagccgaaaggcgagugaggucuaugcgaga

SEQ ID NO: 6075 - RNA, 37 nt, Artificial Sequence
  Description of Artificial Sequence:  Enzymatic Nucleic Acid
gcagcugggccgaaaggcgagugaggucuacaugcga

SEQ ID NO: 6076 - RNA, 37 nt, Artificial Sequence
  Description of Artificial Sequence:  Enzymatic Nucleic Acid
gcuggcaggccgaaaggcgagugaggucuuggcacau

SEQ ID NO: 6077 - RNA, 37 nt, Artificial Sequence
  Description of Artificial Sequence:  Enzymatic Nucleic Acid
gaagcugggccgaaaggcgagugaggucuagcuggca

SEQ ID NO: 6078 - RNA, 37 nt, Artificial Sequence
  Description of Artificial Sequence:  Enzymatic Nucleic Acid
cacggaaggccgaaaggcgagugaggucuuggcagcu

SEQ ID NO: 6079 - RNA, 37 nt, Artificial Sequence
  Description of Artificial Sequence:  Enzymatic Nucleic Acid
ggcaggcagccgaaaggcgagugaggucuggaagcug

SEQ ID NO: 6080 - RNA, 37 nt, Artificial Sequence
  Description of Artificial Sequence:  Enzymatic Nucleic Acid
gcggcagggccgaaaggcgagugaggucuacggaagc

SEQ ID NO: 6081 - RNA, 37 nt, Artificial Sequence
  Description of Artificial Sequence:  Enzymatic Nucleic Acid
gguugcgggccgaaaggcgagugaggucuaggcacgg

SEQ ID NO: 6082 - RNA, 37 nt, Artificial Sequence
  Description of Artificial Sequence:  Enzymatic Nucleic Acid
ugagguuggccgaaaggcgagugaggucuggcaggca

SEQ ID NO: 6083 - RNA, 37 nt, Artificial Sequence
  Description of Artificial Sequence:  Enzymatic Nucleic Acid
ugcagccagccgaaaggcgagugaggucuaggauggu

SEQ ID NO: 6084 - RNA, 37 nt, Artificial Sequence
  Description of Artificial Sequence:  Enzymatic Nucleic Acid
gagugcaggccgaaaggcgagugaggucucacaggau

SEQ ID NO: 6085 - RNA, 37 nt, Artificial Sequence
  Description of Artificial Sequence:  Enzymatic Nucleic Acid
uucgaguggccgaaaggcgagugaggucuagccacag

SEQ ID NO: 6086 - RNA, 37 nt, Artificial Sequence
  Description of Artificial Sequence:  Enzymatic Nucleic Acid
ggccagcagccgaaaggcgagugaggucuauucgagu

SEQ ID NO: 6087 - RNA, 37 nt, Artificial Sequence
  Description of Artificial Sequence:  Enzymatic Nucleic Acid
cgggccaggccgaaaggcgagugaggucuacauucga

SEQ ID NO: 6088 - RNA, 37 nt, Artificial Sequence
  Description of Artificial Sequence:  Enzymatic Nucleic Acid
aauucggggccgaaaggcgagugaggucucagcacau

SEQ ID NO: 6089 - RNA, 37 nt, Artificial Sequence
  Description of Artificial Sequence:  Enzymatic Nucleic Acid
ggcagccggccgaaaggcgagugaggucuaucaauuc

SEQ ID NO: 6090 - RNA, 37 nt, Artificial Sequence
  Description of Artificial Sequence:  Enzymatic Nucleic Acid
gaaggcaggccgaaaggcgagugaggucucgcaucaa

SEQ ID NO: 6091 - RNA, 37 nt, Artificial Sequence
  Description of Artificial Sequence:  Enzymatic Nucleic Acid
agugaagggccgaaaggcgagugaggucuagccgcau

SEQ ID NO: 6092 - RNA, 37 nt, Artificial Sequence
  Description of Artificial Sequence:  Enzymatic Nucleic Acid
gggccagggccgaaaggcgagugaggucucagugaag

SEQ ID NO: 6093 - RNA, 37 nt, Artificial Sequence
  Description of Artificial Sequence:  Enzymatic Nucleic Acid
caggaggggccgaaaggcgagugaggucucaggccag

SEQ ID NO: 6094 - RNA, 37 nt, Artificial Sequence
  Description of Artificial Sequence:  Enzymatic Nucleic Acid
uccagcuggccgaaaggcgagugaggucuuccaggag

SEQ ID NO: 6095 - RNA, 37 nt, Artificial Sequence
  Description of Artificial Sequence:  Enzymatic Nucleic Acid
agguccaggccgaaaggcgagugaggucuugcuccag

SEQ ID NO: 6096 - RNA, 37 nt, Artificial Sequence
  Description of Artificial Sequence:  Enzymatic Nucleic Acid
cauuaucggccgaaaggcgagugaggucuugaggucc

SEQ ID NO: 6097 - RNA, 37 nt, Artificial Sequence
  Description of Artificial Sequence:  Enzymatic Nucleic Acid
gagcuguggccgaaaggcgagugaggucuauuaucgc

SEQ ID NO: 6098 - RNA, 37 nt, Artificial Sequence
  Description of Artificial Sequence:  Enzymatic Nucleic Acid
gaccggaggccgaaaggcgagugaggucuugugcauu

SEQ ID NO: 6099 - RNA, 37 nt, Artificial Sequence
  Description of Artificial Sequence:  Enzymatic Nucleic Acid
uccacagagccgaaaggcgagugaggucucggagcug

SEQ ID NO: 6100 - RNA, 37 nt, Artificial Sequence
  Description of Artificial Sequence:  Enzymatic Nucleic Acid
aggguccagccgaaaggcgagugaggucuagaccgga

SEQ ID NO: 6101 - RNA, 37 nt, Artificial Sequence
  Description of Artificial Sequence:  Enzymatic Nucleic Acid
gaaugugggccgaaaggcgagugaggucuagggucca

SEQ ID NO: 6102 - RNA, 37 nt, Artificial Sequence
  Description of Artificial Sequence:  Enzymatic Nucleic Acid
ggcccagggccgaaaggcgagugaggucucguggaau

SEQ ID NO: 6103 - RNA, 37 nt, Artificial Sequence
  Description of Artificial Sequence:  Enzymatic Nucleic Acid
guaggcgggccgaaaggcgagugaggucuccaggccg

SEQ ID NO: 6104 - RNA, 37 nt, Artificial Sequence
  Description of Artificial Sequence:  Enzymatic Nucleic Acid
uguguagggccgaaaggcgagugaggucuggcccagg

SEQ ID NO: 6105 - RNA, 37 nt, Artificial Sequence
  Description of Artificial Sequence:  Enzymatic Nucleic Acid
aggugcaggccgaaaggcgagugaggucuguguguag

SEQ ID NO: 6106 - RNA, 37 nt, Artificial Sequence
  Description of Artificial Sequence:  Enzymatic Nucleic Acid
uccagguggccgaaaggcgagugaggucuagcgugug

SEQ ID NO: 6107 - RNA, 37 nt, Artificial Sequence
  Description of Artificial Sequence:  Enzymatic Nucleic Acid
ggccgcaggccgaaaggcgagugaggucugguccagg

SEQ ID NO: 6108 - RNA, 37 nt, Artificial Sequence
  Description of Artificial Sequence:  Enzymatic Nucleic Acid
gcaggccggccgaaaggcgagugaggucuagcggucc

SEQ ID NO: 6109 - RNA, 37 nt, Artificial Sequence
  Description of Artificial Sequence:  Enzymatic Nucleic Acid
ccugcagggccgaaaggcgagugaggucucgcagcgg

SEQ ID NO: 6110 - RNA, 37 nt, Artificial Sequence
  Description of Artificial Sequence:  Enzymatic Nucleic Acid
agcuccuggccgaaaggcgagugaggucuaggccgca

SEQ ID NO: 6111 - RNA, 37 nt, Artificial Sequence
  Description of Artificial Sequence:  Enzymatic Nucleic Acid
gggcccaggccgaaaggcgagugaggucuuccugcag

SEQ ID NO: 6112 - RNA, 37 nt, Artificial Sequence
  Description of Artificial Sequence:  Enzymatic Nucleic Acid
gccccggggccgaaaggcgagugaggucuccagcucc

SEQ ID NO: 6113 - RNA, 37 nt, Artificial Sequence
  Description of Artificial Sequence:  Enzymatic Nucleic Acid
cggaacaggccgaaaggcgagugaggucucccgggcc

SEQ ID NO: 6114 - RNA, 37 nt, Artificial Sequence
  Description of Artificial Sequence:  Enzymatic Nucleic Acid
ccgcggaagccgaaaggcgagugaggucuagccccgg

SEQ ID NO: 6115 - RNA, 37 nt, Artificial Sequence
  Description of Artificial Sequence:  Enzymatic Nucleic Acid
ccaggccggccgaaaggcgagugaggucuggaacagc

SEQ ID NO: 6116 - RNA, 37 nt, Artificial Sequence
  Description of Artificial Sequence:  Enzymatic Nucleic Acid
cagccagggccgaaaggcgagugaggucucgcggaac

SEQ ID NO: 6117 - RNA, 37 nt, Artificial Sequence
  Description of Artificial Sequence:  Enzymatic Nucleic Acid
cagggcaggccgaaaggcgagugaggucucaggccgc

SEQ ID NO: 6118 - RNA, 37 nt, Artificial Sequence
  Description of Artificial Sequence:  Enzymatic Nucleic Acid
cugcaggggccgaaaggcgagugaggucuagccaggc

SEQ ID NO: 6119 - RNA, 37 nt, Artificial Sequence
  Description of Artificial Sequence:  Enzymatic Nucleic Acid
agguacuggccgaaaggcgagugaggucuagggcagc

SEQ ID NO: 6120 - RNA, 37 nt, Artificial Sequence
  Description of Artificial Sequence:  Enzymatic Nucleic Acid
uagagguagccgaaaggcgagugaggucuugcagggc

SEQ ID NO: 6121 - RNA, 37 nt, Artificial Sequence
  Description of Artificial Sequence:  Enzymatic Nucleic Acid
uuguccuggccgaaaggcgagugaggucuagguagag

SEQ ID NO: 6122 - RNA, 37 nt, Artificial Sequence
  Description of Artificial Sequence:  Enzymatic Nucleic Acid
cugcagcggccgaaaggcgagugaggucuguuguccu

SEQ ID NO: 6123 - RNA, 37 nt, Artificial Sequence
  Description of Artificial Sequence:  Enzymatic Nucleic Acid
gccugcaggccgaaaggcgagugaggucugcguuguc

SEQ ID NO: 6124 - RNA, 37 nt, Artificial Sequence
  Description of Artificial Sequence:  Enzymatic Nucleic Acid
agugccuggccgaaaggcgagugaggucuagcgcguu

SEQ ID NO: 6125 - RNA, 37 nt, Artificial Sequence
  Description of Artificial Sequence:  Enzymatic Nucleic Acid
aggcaguggccgaaaggcgagugaggucucugcagcg

SEQ ID NO: 6126 - RNA, 37 nt, Artificial Sequence
  Description of Artificial Sequence:  Enzymatic Nucleic Acid
ucaucagggccgaaaggcgagugaggucuagugccug

SEQ ID NO: 6127 - RNA, 37 nt, Artificial Sequence
  Description of Artificial Sequence:  Enzymatic Nucleic Acid
ccaggucggccgaaaggcgagugaggucuggaaggug

SEQ ID NO: 6128 - RNA, 37 nt, Artificial Sequence
  Description of Artificial Sequence:  Enzymatic Nucleic Acid
ugagguuggccgaaaggcgagugaggucuccaggucg

SEQ ID NO: 6129 - RNA, 37 nt, Artificial Sequence
  Description of Artificial Sequence:  Enzymatic Nucleic Acid
uugccguggccgaaaggcgagugaggucuaggaagag

SEQ ID NO: 6130 - RNA, 37 nt, Artificial Sequence
  Description of Artificial Sequence:  Enzymatic Nucleic Acid
uggagauggccgaaaggcgagugaggucugguugccg

SEQ ID NO: 6131 - RNA, 37 nt, Artificial Sequence
  Description of Artificial Sequence:  Enzymatic Nucleic Acid
cgggcacggccgaaaggcgagugaggucuuggagaug

SEQ ID NO: 6132 - RNA, 37 nt, Artificial Sequence
  Description of Artificial Sequence:  Enzymatic Nucleic Acid
cucgggcagccgaaaggcgagugaggucugcuggaga

SEQ ID NO: 6133 - RNA, 37 nt, Artificial Sequence
  Description of Artificial Sequence:  Enzymatic Nucleic Acid
cgcucggggccgaaaggcgagugaggucuacgcugga

SEQ ID NO: 6134 - RNA, 37 nt, Artificial Sequence
  Description of Artificial Sequence:  Enzymatic Nucleic Acid
aaggcgcggccgaaaggcgagugaggucuucgggcac

SEQ ID NO: 6135 - RNA, 37 nt, Artificial Sequence
  Description of Artificial Sequence:  Enzymatic Nucleic Acid
ggaaggcggccgaaaggcgagugaggucugcucgggc

SEQ ID NO: 6136 - RNA, 37 nt, Artificial Sequence
  Description of Artificial Sequence:  Enzymatic Nucleic Acid
acggaagggccgaaaggcgagugaggucugcgcucgg

SEQ ID NO: 6137 - RNA, 37 nt, Artificial Sequence
  Description of Artificial Sequence:  Enzymatic Nucleic Acid
gcagcccagccgaaaggcgagugaggucuggaaggcg

SEQ ID NO: 6138 - RNA, 37 nt, Artificial Sequence
  Description of Artificial Sequence:  Enzymatic Nucleic Acid
cugugcaggccgaaaggcgagugaggucuccacggaa

SEQ ID NO: 6139 - RNA, 37 nt, Artificial Sequence
  Description of Artificial Sequence:  Enzymatic Nucleic Acid
aggcuguggccgaaaggcgagugaggucuagcccacg

SEQ ID NO: 6140 - RNA, 37 nt, Artificial Sequence
  Description of Artificial Sequence:  Enzymatic Nucleic Acid
ggucgagggccgaaaggcgagugaggucuugugcagc

SEQ ID NO: 6141 - RNA, 37 nt, Artificial Sequence
  Description of Artificial Sequence:  Enzymatic Nucleic Acid
guaggagagccgaaaggcgagugaggucuggucgagg

SEQ ID NO: 6142 - RNA, 37 nt, Artificial Sequence
  Description of Artificial Sequence:  Enzymatic Nucleic Acid
uucugguggccgaaaggcgagugaggucuaguaggag

SEQ ID NO: 6143 - RNA, 37 nt, Artificial Sequence
  Description of Artificial Sequence:  Enzymatic Nucleic Acid
gggccacggccgaaaggcgagugaggucugguucugg

SEQ ID NO: 6144 - RNA, 37 nt, Artificial Sequence
  Description of Artificial Sequence:  Enzymatic Nucleic Acid
augggccagccgaaaggcgagugaggucugcgguucu

SEQ ID NO: 6145 - RNA, 37 nt, Artificial Sequence
  Description of Artificial Sequence:  Enzymatic Nucleic Acid
cacauggggccgaaaggcgagugaggucucacgcggu

SEQ ID NO: 6146 - RNA, 37 nt, Artificial Sequence
  Description of Artificial Sequence:  Enzymatic Nucleic Acid
cgggugcagccgaaaggcgagugaggucuaugggcca

SEQ ID NO: 6147 - RNA, 37 nt, Artificial Sequence
  Description of Artificial Sequence:  Enzymatic Nucleic Acid
ugcggguggccgaaaggcgagugaggucuacaugggc

SEQ ID NO: 6148 - RNA, 37 nt, Artificial Sequence
  Description of Artificial Sequence:  Enzymatic Nucleic Acid
aaggcauggccgaaaggcgagugaggucugggugcac

SEQ ID NO: 6149 - RNA, 37 nt, Artificial Sequence
  Description of Artificial Sequence:  Enzymatic Nucleic Acid
acggaagggccgaaaggcgagugaggucuaugcgggu

SEQ ID NO: 6150 - RNA, 37 nt, Artificial Sequence
  Description of Artificial Sequence:  Enzymatic Nucleic Acid
caaggucagccgaaaggcgagugaggucuggaaggca

SEQ ID NO: 6151 - RNA, 37 nt, Artificial Sequence
  Description of Artificial Sequence:  Enzymatic Nucleic Acid
ugaggcgggccgaaaggcgagugaggucucaagguca

SEQ ID NO: 6152 - RNA, 37 nt, Artificial Sequence
  Description of Artificial Sequence:  Enzymatic Nucleic Acid
ucaugagggccgaaaggcgagugaggucuggccaagg

SEQ ID NO: 6153 - RNA, 37 nt, Artificial Sequence
  Description of Artificial Sequence:  Enzymatic Nucleic Acid
uuggcaaagccgaaaggcgagugaggucuagauagag

SEQ ID NO: 6154 - RNA, 37 nt, Artificial Sequence
  Description of Artificial Sequence:  Enzymatic Nucleic Acid
auuguugggccgaaaggcgagugaggucuaaacagau

SEQ ID NO: 6155 - RNA, 37 nt, Artificial Sequence
  Description of Artificial Sequence:  Enzymatic Nucleic Acid
gggcagcggccgaaaggcgagugaggucuugauagau

SEQ ID NO: 6156 - RNA, 37 nt, Artificial Sequence
  Description of Artificial Sequence:  Enzymatic Nucleic Acid
gugggcaggccgaaaggcgagugaggucugcugauag

SEQ ID NO: 6157 - RNA, 37 nt, Artificial Sequence
  Description of Artificial Sequence:  Enzymatic Nucleic Acid
ucaguggggccgaaaggcgagugaggucuagcgcuga

SEQ ID NO: 6158 - RNA, 37 nt, Artificial Sequence
  Description of Artificial Sequence:  Enzymatic Nucleic Acid
ggccaggggccgaaaggcgagugaggucucucagugg

SEQ ID NO: 6159 - RNA, 37 nt, Artificial Sequence
  Description of Artificial Sequence:  Enzymatic Nucleic Acid
cagggggggccgaaaggcgagugaggucucagggccu

SEQ ID NO: 6160 - RNA, 37 nt, Artificial Sequence
  Description of Artificial Sequence:  Enzymatic Nucleic Acid
agggcacggccgaaaggcgagugaggucuaggggggc

SEQ ID NO: 6161 - RNA, 37 nt, Artificial Sequence
  Description of Artificial Sequence:  Enzymatic Nucleic Acid
gcagggcagccgaaaggcgagugaggucugcaggggg

SEQ ID NO: 6162 - RNA, 37 nt, Artificial Sequence
  Description of Artificial Sequence:  Enzymatic Nucleic Acid
cugcaggggccgaaaggcgagugaggucuacgcaggg

SEQ ID NO: 6163 - RNA, 37 nt, Artificial Sequence
  Description of Artificial Sequence:  Enzymatic Nucleic Acid
agguacuggccgaaaggcgagugaggucuagggcacg

SEQ ID NO: 6164 - RNA, 37 nt, Artificial Sequence
  Description of Artificial Sequence:  Enzymatic Nucleic Acid
cucagguagccgaaaggcgagugaggucuugcagggc

SEQ ID NO: 6165 - RNA, 37 nt, Artificial Sequence
  Description of Artificial Sequence:  Enzymatic Nucleic Acid
ucguugaggccgaaaggcgagugaggucucucaggua

SEQ ID NO: 6166 - RNA, 37 nt, Artificial Sequence
  Description of Artificial Sequence:  Enzymatic Nucleic Acid
gucacacagccgaaaggcgagugaggucuccaggggu

SEQ ID NO: 6167 - RNA, 37 nt, Artificial Sequence
  Description of Artificial Sequence:  Enzymatic Nucleic Acid
cagucacagccgaaaggcgagugaggucuacccaggg

SEQ ID NO: 6168 - RNA, 37 nt, Artificial Sequence
  Description of Artificial Sequence:  Enzymatic Nucleic Acid
ggcagucagccgaaaggcgagugaggucuacacccag

SEQ ID NO: 6169 - RNA, 37 nt, Artificial Sequence
  Description of Artificial Sequence:  Enzymatic Nucleic Acid
gugcccgggccgaaaggcgagugaggucuagucacac

SEQ ID NO: 6170 - RNA, 37 nt, Artificial Sequence
  Description of Artificial Sequence:  Enzymatic Nucleic Acid
ugggcguggccgaaaggcgagugaggucuccggcagu

SEQ ID NO: 6171 - RNA, 37 nt, Artificial Sequence
  Description of Artificial Sequence:  Enzymatic Nucleic Acid
agaguggggccgaaaggcgagugaggucugugcccgg

SEQ ID NO: 6172 - RNA, 37 nt, Artificial Sequence
  Description of Artificial Sequence:  Enzymatic Nucleic Acid
cagccagggccgaaaggcgagugaggucuccagagug

SEQ ID NO: 6173 - RNA, 37 nt, Artificial Sequence
  Description of Artificial Sequence:  Enzymatic Nucleic Acid
uucugcaggccgaaaggcgagugaggucucaggccca

SEQ ID NO: 6174 - RNA, 37 nt, Artificial Sequence
  Description of Artificial Sequence:  Enzymatic Nucleic Acid
aacuucuggccgaaaggcgagugaggucuagccaggc

SEQ ID NO: 6175 - RNA, 37 nt, Artificial Sequence
  Description of Artificial Sequence:  Enzymatic Nucleic Acid
ccgcggaagccgaaaggcgagugaggucuuucugcag

SEQ ID NO: 6176 - RNA, 37 nt, Artificial Sequence
  Description of Artificial Sequence:  Enzymatic Nucleic Acid
aggagccggccgaaaggcgagugaggucuggaacuuc

SEQ ID NO: 6177 - RNA, 37 nt, Artificial Sequence
  Description of Artificial Sequence:  Enzymatic Nucleic Acid
aggaggaggccgaaaggcgagugaggucucgcggaac

SEQ ID NO: 6178 - RNA, 37 nt, Artificial Sequence
  Description of Artificial Sequence:  Enzymatic Nucleic Acid
gcagggcagccgaaaggcgagugaggucucucggagg

SEQ ID NO: 6179 - RNA, 37 nt, Artificial Sequence
  Description of Artificial Sequence:  Enzymatic Nucleic Acid
cugcaggggccgaaaggcgagugaggucuaccucgga

SEQ ID NO: 6180 - RNA, 37 nt, Artificial Sequence
  Description of Artificial Sequence:  Enzymatic Nucleic Acid
ggaggcuggccgaaaggcgagugaggucuagggcacc

SEQ ID NO: 6181 - RNA, 37 nt, Artificial Sequence
  Description of Artificial Sequence:  Enzymatic Nucleic Acid
gcgggagggccgaaaggcgagugaggucuugcagggc

SEQ ID NO: 6182 - RNA, 37 nt, Artificial Sequence
  Description of Artificial Sequence:  Enzymatic Nucleic Acid
aggcguuggccgaaaggcgagugaggucugggaggcu

SEQ ID NO: 6183 - RNA, 37 nt, Artificial Sequence
  Description of Artificial Sequence:  Enzymatic Nucleic Acid
cagccagggccgaaaggcgagugaggucuguugcggg

SEQ ID NO: 6184 - RNA, 37 nt, Artificial Sequence
  Description of Artificial Sequence:  Enzymatic Nucleic Acid
acggccaggccgaaaggcgagugaggucucaggcguu

SEQ ID NO: 6185 - RNA, 37 nt, Artificial Sequence
  Description of Artificial Sequence:  Enzymatic Nucleic Acid
ggucacgggccgaaaggcgagugaggucucagccagg

SEQ ID NO: 6186 - RNA, 37 nt, Artificial Sequence
  Description of Artificial Sequence:  Enzymatic Nucleic Acid
ugaggucagccgaaaggcgagugaggucuggccagcc

SEQ ID NO: 6187 - RNA, 37 nt, Artificial Sequence
  Description of Artificial Sequence:  Enzymatic Nucleic Acid
cagcuagggccgaaaggcgagugaggucuguuugagg

SEQ ID NO: 6188 - RNA, 37 nt, Artificial Sequence
  Description of Artificial Sequence:  Enzymatic Nucleic Acid
auuggcaggccgaaaggcgagugaggucuuaggcguu

SEQ ID NO: 6189 - RNA, 37 nt, Artificial Sequence
  Description of Artificial Sequence:  Enzymatic Nucleic Acid
gucauugggccgaaaggcgagugaggucuagcuaggc

SEQ ID NO: 6190 - RNA, 37 nt, Artificial Sequence
  Description of Artificial Sequence:  Enzymatic Nucleic Acid
cagcccuggccgaaaggcgagugaggucuaggucauu

SEQ ID NO: 6191 - RNA, 37 nt, Artificial Sequence
  Description of Artificial Sequence:  Enzymatic Nucleic Acid
cagcgcaggccgaaaggcgagugaggucuccugcagg

SEQ ID NO: 6192 - RNA, 37 nt, Artificial Sequence
  Description of Artificial Sequence:  Enzymatic Nucleic Acid
ccacagcggccgaaaggcgagugaggucuagcccugc

SEQ ID NO: 6193 - RNA, 37 nt, Artificial Sequence
  Description of Artificial Sequence:  Enzymatic Nucleic Acid
ggccacaggccgaaaggcgagugaggucugcagcccu

SEQ ID NO: 6194 - RNA, 37 nt, Artificial Sequence
  Description of Artificial Sequence:  Enzymatic Nucleic Acid
gguggccagccgaaaggcgagugaggucuagcgcagc

SEQ ID NO: 6195 - RNA, 37 nt, Artificial Sequence
  Description of Artificial Sequence:  Enzymatic Nucleic Acid
gccggugggccgaaaggcgagugaggucucacagcgc

SEQ ID NO: 6196 - RNA, 37 nt, Artificial Sequence
  Description of Artificial Sequence:  Enzymatic Nucleic Acid
gguaaggggccgaaaggcgagugaggucucgguggcc

SEQ ID NO: 6197 - RNA, 37 nt, Artificial Sequence
  Description of Artificial Sequence:  Enzymatic Nucleic Acid
uggcccuggccgaaaggcgagugaggucucgguccag

SEQ ID NO: 6198 - RNA, 37 nt, Artificial Sequence
  Description of Artificial Sequence:  Enzymatic Nucleic Acid
aucggugggccgaaaggcgagugaggucuccugccgg

SEQ ID NO: 6199 - RNA, 37 nt, Artificial Sequence
  Description of Artificial Sequence:  Enzymatic Nucleic Acid
cccagcgggccgaaaggcgagugaggucuuccucauc

SEQ ID NO: 6200 - RNA, 37 nt, Artificial Sequence
  Description of Artificial Sequence:  Enzymatic Nucleic Acid
agccccaggccgaaaggcgagugaggucuggcuccuc

SEQ ID NO: 6201 - RNA, 37 nt, Artificial Sequence
  Description of Artificial Sequence:  Enzymatic Nucleic Acid
uugggaaggccgaaaggcgagugaggucucccagcgg

SEQ ID NO: 6202 - RNA, 37 nt, Artificial Sequence
  Description of Artificial Sequence:  Enzymatic Nucleic Acid
uggcagcagccgaaaggcgagugaggucuuugggaag

SEQ ID NO: 6203 - RNA, 37 nt, Artificial Sequence
  Description of Artificial Sequence:  Enzymatic Nucleic Acid
gcuggcaggccgaaaggcgagugaggucuacuuggga

SEQ ID NO: 6204 - RNA, 37 nt, Artificial Sequence
  Description of Artificial Sequence:  Enzymatic Nucleic Acid
cuggcugggccgaaaggcgagugaggucuagcacuug

SEQ ID NO: 6205 - RNA, 37 nt, Artificial Sequence
  Description of Artificial Sequence:  Enzymatic Nucleic Acid
gcaucugggccgaaaggcgagugaggucuuggcagca

SEQ ID NO: 6206 - RNA, 37 nt, Artificial Sequence
  Description of Artificial Sequence:  Enzymatic Nucleic Acid
gucagcgggccgaaaggcgagugaggucuaucuggcu

SEQ ID NO: 6207 - RNA, 37 nt, Artificial Sequence
  Description of Artificial Sequence:  Enzymatic Nucleic Acid
cuugucaggccgaaaggcgagugaggucuggcaucug

SEQ ID NO: 6208 - RNA, 37 nt, Artificial Sequence
  Description of Artificial Sequence:  Enzymatic Nucleic Acid
uacugagggccgaaaggcgagugaggucucuugucag

SEQ ID NO: 6209 - RNA, 37 nt, Artificial Sequence
  Description of Artificial Sequence:  Enzymatic Nucleic Acid
cuccaguagccgaaaggcgagugaggucuugaggccu

SEQ ID NO: 6210 - RNA, 37 nt, Artificial Sequence
  Description of Artificial Sequence:  Enzymatic Nucleic Acid
cuuccagggccgaaaggcgagugaggucuuccaguac

SEQ ID NO: 6211 - RNA, 37 nt, Artificial Sequence
  Description of Artificial Sequence:  Enzymatic Nucleic Acid
ugccgaaggccgaaaggcgagugaggucuuggucuuc

SEQ ID NO: 6212 - RNA, 37 nt, Artificial Sequence
  Description of Artificial Sequence:  Enzymatic Nucleic Acid
auugccuggccgaaaggcgagugaggucucgaagcug

SEQ ID NO: 6213 - RNA, 37 nt, Artificial Sequence
  Description of Artificial Sequence:  Enzymatic Nucleic Acid
gcgcauuggccgaaaggcgagugaggucucugccgaa

SEQ ID NO: 6214 - RNA, 37 nt, Artificial Sequence
  Description of Artificial Sequence:  Enzymatic Nucleic Acid
cuucagcggccgaaaggcgagugaggucuauugccug

SEQ ID NO: 6215 - RNA, 37 nt, Artificial Sequence
  Description of Artificial Sequence:  Enzymatic Nucleic Acid
cccuucaggccgaaaggcgagugaggucugcauugcc

SEQ ID NO: 6216 - RNA, 37 nt, Artificial Sequence
  Description of Artificial Sequence:  Enzymatic Nucleic Acid
gcggcacggccgaaaggcgagugaggucugucccuuc

SEQ ID NO: 6217 - RNA, 37 nt, Artificial Sequence
  Description of Artificial Sequence:  Enzymatic Nucleic Acid
gggcggcagccgaaaggcgagugaggucugcgucccu

SEQ ID NO: 6218 - RNA, 37 nt, Artificial Sequence
  Description of Artificial Sequence:  Enzymatic Nucleic Acid
ccgggcgggccgaaaggcgagugaggucuacgcgucc

SEQ ID NO: 6219 - RNA, 37 nt, Artificial Sequence
  Description of Artificial Sequence:  Enzymatic Nucleic Acid
ucaccggggccgaaaggcgagugaggucuggcacgcg

SEQ ID NO: 6220 - RNA, 37 nt, Artificial Sequence
  Description of Artificial Sequence:  Enzymatic Nucleic Acid
ggcugucagccgaaaggcgagugaggucucgggcggc

SEQ ID NO: 6221 - RNA, 37 nt, Artificial Sequence
  Description of Artificial Sequence:  Enzymatic Nucleic Acid
ccggcggggccgaaaggcgagugaggucuugucaccg

SEQ ID NO: 6222 - RNA, 37 nt, Artificial Sequence
  Description of Artificial Sequence:  Enzymatic Nucleic Acid
uugcccgggccgaaaggcgagugaggucugggcuguc

SEQ ID NO: 6223 - RNA, 37 nt, Artificial Sequence
  Description of Artificial Sequence:  Enzymatic Nucleic Acid
agccguuggccgaaaggcgagugaggucuccggcggg

SEQ ID NO: 6224 - RNA, 37 nt, Artificial Sequence
  Description of Artificial Sequence:  Enzymatic Nucleic Acid
ggccagaggccgaaaggcgagugaggucucguugccc

SEQ ID NO: 6225 - RNA, 37 nt, Artificial Sequence
  Description of Artificial Sequence:  Enzymatic Nucleic Acid
gccguggggccgaaaggcgagugaggucucagagccg

SEQ ID NO: 6226 - RNA, 37 nt, Artificial Sequence
  Description of Artificial Sequence:  Enzymatic Nucleic Acid
uugauguggccgaaaggcgagugaggucucgugggcc

SEQ ID NO: 6227 - RNA, 37 nt, Artificial Sequence
  Description of Artificial Sequence:  Enzymatic Nucleic Acid
gagccagggccgaaaggcgagugaggucuagaguccc

SEQ ID NO: 6228 - RNA, 37 nt, Artificial Sequence
  Description of Artificial Sequence:  Enzymatic Nucleic Acid
cagcagaggccgaaaggcgagugaggucucaggcaga

SEQ ID NO: 6229 - RNA, 37 nt, Artificial Sequence
  Description of Artificial Sequence:  Enzymatic Nucleic Acid
gggcucaggccgaaaggcgagugaggucuagagccag

SEQ ID NO: 6230 - RNA, 37 nt, Artificial Sequence
  Description of Artificial Sequence:  Enzymatic Nucleic Acid
agcggggggccgaaaggcgagugaggucuucagcaga

SEQ ID NO: 6231 - RNA, 37 nt, Artificial Sequence
  Description of Artificial Sequence:  Enzymatic Nucleic Acid
gcagugaggccgaaaggcgagugaggucugggggcuc

SEQ ID NO: 6232 - RNA, 37 nt, Artificial Sequence
  Description of Artificial Sequence:  Enzymatic Nucleic Acid
ccgcacuggccgaaaggcgagugaggucuagugagcg

SEQ ID NO: 6233 - RNA, 37 nt, Artificial Sequence
  Description of Artificial Sequence:  Enzymatic Nucleic Acid
gggccgcagccgaaaggcgagugaggucuugcaguga

SEQ ID NO: 6234 - RNA, 37 nt, Artificial Sequence
  Description of Artificial Sequence:  Enzymatic Nucleic Acid
ucgggccggccgaaaggcgagugaggucuacugcagu

SEQ ID NO: 6235 - RNA, 37 nt, Artificial Sequence
  Description of Artificial Sequence:  Enzymatic Nucleic Acid
cccucggggccgaaaggcgagugaggucucgcacugc

SEQ ID NO: 6236 - RNA, 37 nt, Artificial Sequence
  Description of Artificial Sequence:  Enzymatic Nucleic Acid
gcucggaggccgaaaggcgagugaggucuccucgggc

SEQ ID NO: 6237 - RNA, 37 nt, Artificial Sequence
  Description of Artificial Sequence:  Enzymatic Nucleic Acid
ccuggugggccgaaaggcgagugaggucuucggagcc

SEQ ID NO: 6238 - RNA, 37 nt, Artificial Sequence
  Description of Artificial Sequence:  Enzymatic Nucleic Acid
guggggaagccgaaaggcgagugaggucuccuggugg

SEQ ID NO: 6239 - RNA, 37 nt, Artificial Sequence
  Description of Artificial Sequence:  Enzymatic Nucleic Acid
ggcgaggggccgaaaggcgagugaggucuccgaggug

SEQ ID NO: 6240 - RNA, 37 nt, Artificial Sequence
  Description of Artificial Sequence:  Enzymatic Nucleic Acid
gccuccgggccgaaaggcgagugaggucugagggccc

SEQ ID NO: 6241 - RNA, 37 nt, Artificial Sequence
  Description of Artificial Sequence:  Enzymatic Nucleic Acid
cagccugggccgaaaggcgagugaggucucuccggcg

SEQ ID NO: 6242 - RNA, 37 nt, Artificial Sequence
  Description of Artificial Sequence:  Enzymatic Nucleic Acid
gugaacaggccgaaaggcgagugaggucucuggccuc

SEQ ID NO: 6243 - RNA, 37 nt, Artificial Sequence
  Description of Artificial Sequence:  Enzymatic Nucleic Acid
ugcgugaagccgaaaggcgagugaggucuagccuggc

SEQ ID NO: 6244 - RNA, 37 nt, Artificial Sequence
  Description of Artificial Sequence:  Enzymatic Nucleic Acid
gguucuuggccgaaaggcgagugaggucugugaacag

SEQ ID NO: 6245 - RNA, 37 nt, Artificial Sequence
  Description of Artificial Sequence:  Enzymatic Nucleic Acid
ugcggguggccgaaaggcgagugaggucugguucuug

SEQ ID NO: 6246 - RNA, 37 nt, Artificial Sequence
  Description of Artificial Sequence:  Enzymatic Nucleic Acid
aguggcuggccgaaaggcgagugaggucugggugcgg

SEQ ID NO: 6247 - RNA, 37 nt, Artificial Sequence
  Description of Artificial Sequence:  Enzymatic Nucleic Acid
ggcagugggccgaaaggcgagugaggucuugcgggug

SEQ ID NO: 6248 - RNA, 37 nt, Artificial Sequence
  Description of Artificial Sequence:  Enzymatic Nucleic Acid
ccagacgggccgaaaggcgagugaggucuaguggcug

SEQ ID NO: 6249 - RNA, 37 nt, Artificial Sequence
  Description of Artificial Sequence:  Enzymatic Nucleic Acid
ggcccagagccgaaaggcgagugaggucuggcagugg

SEQ ID NO: 6250 - RNA, 37 nt, Artificial Sequence
  Description of Artificial Sequence:  Enzymatic Nucleic Acid
cugccugggccgaaaggcgagugaggucuccagacgg

SEQ ID NO: 6251 - RNA, 37 nt, Artificial Sequence
  Description of Artificial Sequence:  Enzymatic Nucleic Acid
gcugccuggccgaaaggcgagugaggucucuggccca

SEQ ID NO: 6252 - RNA, 37 nt, Artificial Sequence
  Description of Artificial Sequence:  Enzymatic Nucleic Acid
ccccgcuggccgaaaggcgagugaggucucugccugg

SEQ ID NO: 6253 - RNA, 37 nt, Artificial Sequence
  Description of Artificial Sequence:  Enzymatic Nucleic Acid
cacccccggccgaaaggcgagugaggucuugccugcc

SEQ ID NO: 6254 - RNA, 37 nt, Artificial Sequence
  Description of Artificial Sequence:  Enzymatic Nucleic Acid
ucccgccagccgaaaggcgagugaggucuccccgcug

SEQ ID NO: 6255 - RNA, 37 nt, Artificial Sequence
  Description of Artificial Sequence:  Enzymatic Nucleic Acid
cagucccggccgaaaggcgagugaggucucacccccg

SEQ ID NO: 6256 - RNA, 37 nt, Artificial Sequence
  Description of Artificial Sequence:  Enzymatic Nucleic Acid
cugagucagccgaaaggcgagugaggucucagucccg

SEQ ID NO: 6257 - RNA, 37 nt, Artificial Sequence
  Description of Artificial Sequence:  Enzymatic Nucleic Acid
caccugaggccgaaaggcgagugaggucucuucugag

SEQ ID NO: 6258 - RNA, 37 nt, Artificial Sequence
  Description of Artificial Sequence:  Enzymatic Nucleic Acid
guagggcagccgaaaggcgagugaggucucugagccu

SEQ ID NO: 6259 - RNA, 37 nt, Artificial Sequence
  Description of Artificial Sequence:  Enzymatic Nucleic Acid
ggguaggggccgaaaggcgagugaggucuaccugagc

SEQ ID NO: 6260 - RNA, 37 nt, Artificial Sequence
  Description of Artificial Sequence:  Enzymatic Nucleic Acid
aggugagggccgaaaggcgagugaggucuuggguagg

SEQ ID NO: 6261 - RNA, 37 nt, Artificial Sequence
  Description of Artificial Sequence:  Enzymatic Nucleic Acid
ugaggcuggccgaaaggcgagugaggucuaggugagg

SEQ ID NO: 6262 - RNA, 37 nt, Artificial Sequence
  Description of Artificial Sequence:  Enzymatic Nucleic Acid
gggugagggccgaaaggcgagugaggucuugcaggug

SEQ ID NO: 6263 - RNA, 37 nt, Artificial Sequence
  Description of Artificial Sequence:  Enzymatic Nucleic Acid
gcgccagggccgaaaggcgagugaggucuccaggggg

SEQ ID NO: 6264 - RNA, 37 nt, Artificial Sequence
  Description of Artificial Sequence:  Enzymatic Nucleic Acid
caccagcggccgaaaggcgagugaggucucaggccca

SEQ ID NO: 6265 - RNA, 37 nt, Artificial Sequence
  Description of Artificial Sequence:  Enzymatic Nucleic Acid
agcaccaggccgaaaggcgagugaggucugccaggcc

SEQ ID NO: 6266 - RNA, 37 nt, Artificial Sequence
  Description of Artificial Sequence:  Enzymatic Nucleic Acid
ccacagcagccgaaaggcgagugaggucucagcgcca

SEQ ID NO: 6267 - RNA, 37 nt, Artificial Sequence
  Description of Artificial Sequence:  Enzymatic Nucleic Acid
guccacaggccgaaaggcgagugaggucuaccagcgc

SEQ ID NO: 6268 - RNA, 37 nt, Artificial Sequence
  Description of Artificial Sequence:  Enzymatic Nucleic Acid
acuguccagccgaaaggcgagugaggucuagcaccag

SEQ ID NO: 6269 - RNA, 37 nt, Artificial Sequence
  Description of Artificial Sequence:  Enzymatic Nucleic Acid
cccaagcagccgaaaggcgagugaggucuuguccaca

SEQ ID NO: 6270 - RNA, 37 nt, Artificial Sequence
  Description of Artificial Sequence:  Enzymatic Nucleic Acid
ggcccaaggccgaaaggcgagugaggucuacugucca

SEQ ID NO: 6271 - RNA, 37 nt, Artificial Sequence
  Description of Artificial Sequence:  Enzymatic Nucleic Acid
cagcaggggccgaaaggcgagugaggucuccaagcac

SEQ ID NO: 6272 - RNA, 37 nt, Artificial Sequence
  Description of Artificial Sequence:  Enzymatic Nucleic Acid
ggggucaggccgaaaggcgagugaggucuagggccca

SEQ ID NO: 6273 - DNA, 31 bp, Artificial Sequence
  Description of Artificial Sequence:  Enzymatic Nucleic Acid
cttcatcgggctagctacaacgaaggggttg

SEQ ID NO: 6274 - DNA, 31 bp, Artificial Sequence
  Description of Artificial Sequence:  Enzymatic Nucleic Acid
ttgtagcaggctagctacaacgaacgcaggc

SEQ ID NO: 6275 - DNA, 31 bp, Artificial Sequence
  Description of Artificial Sequence:  Enzymatic Nucleic Acid
gctcattgggctagctacaacgaagcatacg

SEQ ID NO: 6276 - DNA, 31 bp, Artificial Sequence
  Description of Artificial Sequence:  Enzymatic Nucleic Acid
agcgtgtgggctagctacaacgaaggcggcc

SEQ ID NO: 6277 - DNA, 31 bp, Artificial Sequence
  Description of Artificial Sequence:  Enzymatic Nucleic Acid
ggtagaggggctagctacaacgaactgcagg

SEQ ID NO: 6278 - DNA, 31 bp, Artificial Sequence
  Description of Artificial Sequence:  Enzymatic Nucleic Acid
cctgcaggggctagctacaacgaagaggtac

SEQ ID NO: 6279 - DNA, 31 bp, Artificial Sequence
  Description of Artificial Sequence:  Enzymatic Nucleic Acid
tggtgcagggctagctacaacgaaggagacg

SEQ ID NO: 6280 - DNA, 31 bp, Artificial Sequence
  Description of Artificial Sequence:  Enzymatic Nucleic Acid
caaacagaggctagctacaacgaagagtgtc

SEQ ID NO: 6281 - DNA, 31 bp, Artificial Sequence
  Description of Artificial Sequence:  Enzymatic Nucleic Acid
agcgctgaggctagctacaacgaagattgtt

SEQ ID NO: 6282 - DNA, 31 bp, Artificial Sequence
  Description of Artificial Sequence:  Enzymatic Nucleic Acid
gcctcaggggctagctacaacgaactgcagg

SEQ ID NO: 6283 - DNA, 31 bp, Artificial Sequence
  Description of Artificial Sequence:  Enzymatic Nucleic Acid
tgggatggggctagctacaacgaaagggccg

SEQ ID NO: 6284 - DNA, 31 bp, Artificial Sequence
  Description of Artificial Sequence:  Enzymatic Nucleic Acid
ggctccagggctagctacaacgaactgaggc

SEQ ID NO: 6285 - DNA, 31 bp, Artificial Sequence
  Description of Artificial Sequence:  Enzymatic Nucleic Acid
aggctgggggctagctacaacgaagggcacc

SEQ ID NO: 6286 - DNA, 31 bp, Artificial Sequence
  Description of Artificial Sequence:  Enzymatic Nucleic Acid
agcacccaggctagctacaacgagccagcag

SEQ ID NO: 6287 - DNA, 31 bp, Artificial Sequence
  Description of Artificial Sequence:  Enzymatic Nucleic Acid
cctgggcaggctagctacaacgaggggctgc

SEQ ID NO: 6288 - DNA, 31 bp, Artificial Sequence
  Description of Artificial Sequence:  Enzymatic Nucleic Acid
agcagggaggctagctacaacgagcccacgg

SEQ ID NO: 6289 - DNA, 31 bp, Artificial Sequence
  Description of Artificial Sequence:  Enzymatic Nucleic Acid
caggaagaggctagctacaacgagcgctggc

SEQ ID NO: 6290 - DNA, 31 bp, Artificial Sequence
  Description of Artificial Sequence:  Enzymatic Nucleic Acid
ggttgccgggctagctacaacgagcaggaag

SEQ ID NO: 6291 - DNA, 31 bp, Artificial Sequence
  Description of Artificial Sequence:  Enzymatic Nucleic Acid
atgcgagaggctagctacaacgagcggttgc

SEQ ID NO: 6292 - DNA, 31 bp, Artificial Sequence
  Description of Artificial Sequence:  Enzymatic Nucleic Acid
ctggcacaggctagctacaacgagcgagatg

SEQ ID NO: 6293 - DNA, 31 bp, Artificial Sequence
  Description of Artificial Sequence:  Enzymatic Nucleic Acid
caggatggggctagctacaacgagaggttgc

SEQ ID NO: 6294 - DNA, 31 bp, Artificial Sequence
  Description of Artificial Sequence:  Enzymatic Nucleic Acid
ccacaggaggctagctacaacgaggtgaggt

SEQ ID NO: 6295 - DNA, 31 bp, Artificial Sequence
  Description of Artificial Sequence:  Enzymatic Nucleic Acid
cattcgagggctagctacaacgagcagccac

SEQ ID NO: 6296 - DNA, 31 bp, Artificial Sequence
  Description of Artificial Sequence:  Enzymatic Nucleic Acid
caggccagggctagctacaacgagaaggcag

SEQ ID NO: 6297 - DNA, 31 bp, Artificial Sequence
  Description of Artificial Sequence:  Enzymatic Nucleic Acid
cggagctgggctagctacaacgagcattatc

SEQ ID NO: 6298 - DNA, 31 bp, Artificial Sequence
  Description of Artificial Sequence:  Enzymatic Nucleic Acid
gtggaatgggctagctacaacgaggcagggt

SEQ ID NO: 6299 - DNA, 31 bp, Artificial Sequence
  Description of Artificial Sequence:  Enzymatic Nucleic Acid
ccgtggaaggctagctacaacgagtggcagg

SEQ ID NO: 6300 - DNA, 31 bp, Artificial Sequence
  Description of Artificial Sequence:  Enzymatic Nucleic Acid
ccaggccgggctagctacaacgaggaatgtg

SEQ ID NO: 6301 - DNA, 31 bp, Artificial Sequence
  Description of Artificial Sequence:  Enzymatic Nucleic Acid
gcagcgtgggctagctacaacgagtaggcgg

SEQ ID NO: 6302 - DNA, 31 bp, Artificial Sequence
  Description of Artificial Sequence:  Enzymatic Nucleic Acid
gtgcagcgggctagctacaacgagtgtaggc

SEQ ID NO: 6303 - DNA, 31 bp, Artificial Sequence
  Description of Artificial Sequence:  Enzymatic Nucleic Acid
ggtccaggggctagctacaacgagcagcgtg

SEQ ID NO: 6304 - DNA, 31 bp, Artificial Sequence
  Description of Artificial Sequence:  Enzymatic Nucleic Acid
tcaggcagggctagctacaacgagcctgcag

SEQ ID NO: 6305 - DNA, 31 bp, Artificial Sequence
  Description of Artificial Sequence:  Enzymatic Nucleic Acid
gcggaaggggctagctacaacgagtcatcag

SEQ ID NO: 6306 - DNA, 31 bp, Artificial Sequence
  Description of Artificial Sequence:  Enzymatic Nucleic Acid
gaggtgtgggctagctacaacgagaggttgc

SEQ ID NO: 6307 - DNA, 31 bp, Artificial Sequence
  Description of Artificial Sequence:  Enzymatic Nucleic Acid
aagaggtgggctagctacaacgagtgaggtt

SEQ ID NO: 6308 - DNA, 31 bp, Artificial Sequence
  Description of Artificial Sequence:  Enzymatic Nucleic Acid
ggaagaggggctagctacaacgagtgtgagg

SEQ ID NO: 6309 - DNA, 31 bp, Artificial Sequence
  Description of Artificial Sequence:  Enzymatic Nucleic Acid
gctggagaggctagctacaacgagcggttgc

SEQ ID NO: 6310 - DNA, 31 bp, Artificial Sequence
  Description of Artificial Sequence:  Enzymatic Nucleic Acid
cgaggctgggctagctacaacgagcagccca

SEQ ID NO: 6311 - DNA, 31 bp, Artificial Sequence
  Description of Artificial Sequence:  Enzymatic Nucleic Acid
ggttctggggctagctacaacgagcagtagg

SEQ ID NO: 6312 - DNA, 31 bp, Artificial Sequence
  Description of Artificial Sequence:  Enzymatic Nucleic Acid
ggtgcacaggctagctacaacgagggccacg

SEQ ID NO: 6313 - DNA, 31 bp, Artificial Sequence
  Description of Artificial Sequence:  Enzymatic Nucleic Acid
catgcgggggctagctacaacgagcacatgg

SEQ ID NO: 6314 - DNA, 31 bp, Artificial Sequence
  Description of Artificial Sequence:  Enzymatic Nucleic Acid
ggaaggcaggctagctacaacgagcgggtgc

SEQ ID NO: 6315 - DNA, 31 bp, Artificial Sequence
  Description of Artificial Sequence:  Enzymatic Nucleic Acid
gagtgtcaggctagctacaacgagaggcggc

SEQ ID NO: 6316 - DNA, 31 bp, Artificial Sequence
  Description of Artificial Sequence:  Enzymatic Nucleic Acid
agatagagggctagctacaacgagtcatgag

SEQ ID NO: 6317 - DNA, 31 bp, Artificial Sequence
  Description of Artificial Sequence:  Enzymatic Nucleic Acid
ggcctcagggctagctacaacgagggcagcg

SEQ ID NO: 6318 - DNA, 31 bp, Artificial Sequence
  Description of Artificial Sequence:  Enzymatic Nucleic Acid
agtgggcgggctagctacaacgagcccggca

SEQ ID NO: 6319 - DNA, 31 bp, Artificial Sequence
  Description of Artificial Sequence:  Enzymatic Nucleic Acid
gcccagagggctagctacaacgagggcgtgc

SEQ ID NO: 6320 - DNA, 31 bp, Artificial Sequence
  Description of Artificial Sequence:  Enzymatic Nucleic Acid
agggccggggctagctacaacgaggccacag

SEQ ID NO: 6321 - DNA, 31 bp, Artificial Sequence
  Description of Artificial Sequence:  Enzymatic Nucleic Acid
agatgggaggctagctacaacgaggtaaggg

SEQ ID NO: 6322 - DNA, 31 bp, Artificial Sequence
  Description of Artificial Sequence:  Enzymatic Nucleic Acid
ggtccagaggctagctacaacgagggatggt

SEQ ID NO: 6323 - DNA, 31 bp, Artificial Sequence
  Description of Artificial Sequence:  Enzymatic Nucleic Acid
ctcatcggggctagctacaacgaggccctgc

SEQ ID NO: 6324 - DNA, 31 bp, Artificial Sequence
  Description of Artificial Sequence:  Enzymatic Nucleic Acid
atgtgccgggctagctacaacgagggccaga

SEQ ID NO: 6325 - DNA, 31 bp, Artificial Sequence
  Description of Artificial Sequence:  Enzymatic Nucleic Acid
cattgatgggctagctacaacgagccgtggg

SEQ ID NO: 6326 - DNA, 31 bp, Artificial Sequence
  Description of Artificial Sequence:  Enzymatic Nucleic Acid
gtcattgaggctagctacaacgagtgccgtg

SEQ ID NO: 6327 - DNA, 31 bp, Artificial Sequence
  Description of Artificial Sequence:  Enzymatic Nucleic Acid
ccaaagggggctagctacaacgagagtcatt

SEQ ID NO: 6328 - DNA, 31 bp, Artificial Sequence
  Description of Artificial Sequence:  Enzymatic Nucleic Acid
cactgcagggctagctacaacgagagcgggg

SEQ ID NO: 6329 - DNA, 31 bp, Artificial Sequence
  Description of Artificial Sequence:  Enzymatic Nucleic Acid
aaccctggggctagctacaacgaggctcgga

SEQ ID NO: 6330 - DNA, 31 bp, Artificial Sequence
  Description of Artificial Sequence:  Enzymatic Nucleic Acid
gcccgaggggctagctacaacgaggggaacc

SEQ ID NO: 6331 - DNA, 31 bp, Artificial Sequence
  Description of Artificial Sequence:  Enzymatic Nucleic Acid
ttcttgcgggctagctacaacgagaacagcc

SEQ ID NO: 6332 - DNA, 31 bp, Artificial Sequence
  Description of Artificial Sequence:  Enzymatic Nucleic Acid
gctgcgggggctagctacaacgagcggttct

SEQ ID NO: 6333 - DNA, 31 bp, Artificial Sequence
  Description of Artificial Sequence:  Enzymatic Nucleic Acid
gacggcagggctagctacaacgaggctgcgg

SEQ ID NO: 6334 - DNA, 31 bp, Artificial Sequence
  Description of Artificial Sequence:  Enzymatic Nucleic Acid
gctgcaggggctagctacaacgagaggctgg

SEQ ID NO: 6335 - DNA, 31 bp, Artificial Sequence
  Description of Artificial Sequence:  Enzymatic Nucleic Acid
caggggggggctagctacaacgagaggctgc

SEQ ID NO: 6336 - DNA, 31 bp, Artificial Sequence
  Description of Artificial Sequence:  Enzymatic Nucleic Acid
agcggacgggctagctacaacgacctcttca

SEQ ID NO: 6337 - DNA, 31 bp, Artificial Sequence
  Description of Artificial Sequence:  Enzymatic Nucleic Acid
ccagcggaggctagctacaacgagccctctt

SEQ ID NO: 6338 - DNA, 31 bp, Artificial Sequence
  Description of Artificial Sequence:  Enzymatic Nucleic Acid
ccctccagggctagctacaacgaggacgccc

SEQ ID NO: 6339 - DNA, 31 bp, Artificial Sequence
  Description of Artificial Sequence:  Enzymatic Nucleic Acid
gcagccggggctagctacaacgatccctcca

SEQ ID NO: 6340 - DNA, 31 bp, Artificial Sequence
  Description of Artificial Sequence:  Enzymatic Nucleic Acid
gccagcagggctagctacaacgacggctccc

SEQ ID NO: 6341 - DNA, 31 bp, Artificial Sequence
  Description of Artificial Sequence:  Enzymatic Nucleic Acid
catgccagggctagctacaacgaagccggct

SEQ ID NO: 6342 - DNA, 31 bp, Artificial Sequence
  Description of Artificial Sequence:  Enzymatic Nucleic Acid
cacccatgggctagctacaacgacagcagcc

SEQ ID NO: 6343 - DNA, 31 bp, Artificial Sequence
  Description of Artificial Sequence:  Enzymatic Nucleic Acid
ccacagcaggctagctacaacgaccatgcca

SEQ ID NO: 6344 - DNA, 31 bp, Artificial Sequence
  Description of Artificial Sequence:  Enzymatic Nucleic Acid
agccacagggctagctacaacgaacccatgc

SEQ ID NO: 6345 - DNA, 31 bp, Artificial Sequence
  Description of Artificial Sequence:  Enzymatic Nucleic Acid
tgcagccaggctagctacaacgaagcaccca

SEQ ID NO: 6346 - DNA, 31 bp, Artificial Sequence
  Description of Artificial Sequence:  Enzymatic Nucleic Acid
gcctgcagggctagctacaacgacacagcac

SEQ ID NO: 6347 - DNA, 31 bp, Artificial Sequence
  Description of Artificial Sequence:  Enzymatic Nucleic Acid
caggcctgggctagctacaacgaagccacag

SEQ ID NO: 6348 - DNA, 31 bp, Artificial Sequence
  Description of Artificial Sequence:  Enzymatic Nucleic Acid
ctgccaggggctagctacaacgactgcagcc

SEQ ID NO: 6349 - DNA, 31 bp, Artificial Sequence
  Description of Artificial Sequence:  Enzymatic Nucleic Acid
gccacctgggctagctacaacgacaggcctg

SEQ ID NO: 6350 - DNA, 31 bp, Artificial Sequence
  Description of Artificial Sequence:  Enzymatic Nucleic Acid
ggctgccaggctagctacaacgactgccagg

SEQ ID NO: 6351 - DNA, 31 bp, Artificial Sequence
  Description of Artificial Sequence:  Enzymatic Nucleic Acid
tggggctgggctagctacaacgacacctgcc

SEQ ID NO: 6352 - DNA, 31 bp, Artificial Sequence
  Description of Artificial Sequence:  Enzymatic Nucleic Acid
gcatggggggctagctacaacgatgccacct

SEQ ID NO: 6353 - DNA, 31 bp, Artificial Sequence
  Description of Artificial Sequence:  Enzymatic Nucleic Acid
cacctgggggctagctacaacgaatggggct

SEQ ID NO: 6354 - DNA, 31 bp, Artificial Sequence
  Description of Artificial Sequence:  Enzymatic Nucleic Acid
cgcaggcaggctagctacaacgactgggcat

SEQ ID NO: 6355 - DNA, 31 bp, Artificial Sequence
  Description of Artificial Sequence:  Enzymatic Nucleic Acid
tacgcaggggctagctacaacgaacctgggc

SEQ ID NO: 6356 - DNA, 31 bp, Artificial Sequence
  Description of Artificial Sequence:  Enzymatic Nucleic Acid
agcatacgggctagctacaacgaaggcacct

SEQ ID NO: 6357 - DNA, 31 bp, Artificial Sequence
  Description of Artificial Sequence:  Enzymatic Nucleic Acid
gtagcataggctagctacaacgagcaggcac

SEQ ID NO: 6358 - DNA, 31 bp, Artificial Sequence
  Description of Artificial Sequence:  Enzymatic Nucleic Acid
cattgtagggctagctacaacgaatacgcag

SEQ ID NO: 6359 - DNA, 31 bp, Artificial Sequence
  Description of Artificial Sequence:  Enzymatic Nucleic Acid
accttgggggctagctacaacgatcattgta

SEQ ID NO: 6360 - DNA, 31 bp, Artificial Sequence
  Description of Artificial Sequence:  Enzymatic Nucleic Acid
tgtcgtcaggctagctacaacgacttgggct

SEQ ID NO: 6361 - DNA, 31 bp, Artificial Sequence
  Description of Artificial Sequence:  Enzymatic Nucleic Acid
gggggcagggctagctacaacgattgtcgtc

SEQ ID NO: 6362 - DNA, 31 bp, Artificial Sequence
  Description of Artificial Sequence:  Enzymatic Nucleic Acid
gctgggggggctagctacaacgaagcttgtc

SEQ ID NO: 6363 - DNA, 31 bp, Artificial Sequence
  Description of Artificial Sequence:  Enzymatic Nucleic Acid
aggccctgggctagctacaacgatgggggca

SEQ ID NO: 6364 - DNA, 31 bp, Artificial Sequence
  Description of Artificial Sequence:  Enzymatic Nucleic Acid
cctgcaggggctagctacaacgacctgctgg

SEQ ID NO: 6365 - DNA, 31 bp, Artificial Sequence
  Description of Artificial Sequence:  Enzymatic Nucleic Acid
acagcctgggctagctacaacgaaggccctg

SEQ ID NO: 6366 - DNA, 31 bp, Artificial Sequence
  Description of Artificial Sequence:  Enzymatic Nucleic Acid
gggcacagggctagctacaacgactgcaggc

SEQ ID NO: 6367 - DNA, 31 bp, Artificial Sequence
  Description of Artificial Sequence:  Enzymatic Nucleic Acid
cacgggcaggctagctacaacgaagcctgca

SEQ ID NO: 6368 - DNA, 31 bp, Artificial Sequence
  Description of Artificial Sequence:  Enzymatic Nucleic Acid
cccacgggggctagctacaacgaacagcctg

SEQ ID NO: 6369 - DNA, 31 bp, Artificial Sequence
  Description of Artificial Sequence:  Enzymatic Nucleic Acid
gatgcccaggctagctacaacgagggcacag

SEQ ID NO: 6370 - DNA, 31 bp, Artificial Sequence
  Description of Artificial Sequence:  Enzymatic Nucleic Acid
cagggatgggctagctacaacgaccacgggc

SEQ ID NO: 6371 - DNA, 31 bp, Artificial Sequence
  Description of Artificial Sequence:  Enzymatic Nucleic Acid
gctggcagggctagctacaacgaagggatgc

SEQ ID NO: 6372 - DNA, 31 bp, Artificial Sequence
  Description of Artificial Sequence:  Enzymatic Nucleic Acid
ctggctggggctagctacaacgaagcaggga

SEQ ID NO: 6373 - DNA, 31 bp, Artificial Sequence
  Description of Artificial Sequence:  Enzymatic Nucleic Acid
tgcgctggggctagctacaacgatggcagca

SEQ ID NO: 6374 - DNA, 31 bp, Artificial Sequence
  Description of Artificial Sequence:  Enzymatic Nucleic Acid
aagatgcgggctagctacaacgatggctggc

SEQ ID NO: 6375 - DNA, 31 bp, Artificial Sequence
  Description of Artificial Sequence:  Enzymatic Nucleic Acid
ggaagatgggctagctacaacgagctggctg

SEQ ID NO: 6376 - DNA, 31 bp, Artificial Sequence
  Description of Artificial Sequence:  Enzymatic Nucleic Acid
ttgccgtgggctagctacaacgaaggaagat

SEQ ID NO: 6377 - DNA, 31 bp, Artificial Sequence
  Description of Artificial Sequence:  Enzymatic Nucleic Acid
tgcggttgggctagctacaacgacgtgcagg

SEQ ID NO: 6378 - DNA, 31 bp, Artificial Sequence
  Description of Artificial Sequence:  Enzymatic Nucleic Acid
gcgagatgggctagctacaacgaggttgccg

SEQ ID NO: 6379 - DNA, 31 bp, Artificial Sequence
  Description of Artificial Sequence:  Enzymatic Nucleic Acid
ggcacatgggctagctacaacgagagatgcg

SEQ ID NO: 6380 - DNA, 31 bp, Artificial Sequence
  Description of Artificial Sequence:  Enzymatic Nucleic Acid
agctggcaggctagctacaacgaatgcgaga

SEQ ID NO: 6381 - DNA, 31 bp, Artificial Sequence
  Description of Artificial Sequence:  Enzymatic Nucleic Acid
gcagctggggctagctacaacgaacatgcga

SEQ ID NO: 6382 - DNA, 31 bp, Artificial Sequence
  Description of Artificial Sequence:  Enzymatic Nucleic Acid
gctggcagggctagctacaacgatggcacat

SEQ ID NO: 6383 - DNA, 31 bp, Artificial Sequence
  Description of Artificial Sequence:  Enzymatic Nucleic Acid
gaagctggggctagctacaacgaagctggca

SEQ ID NO: 6384 - DNA, 31 bp, Artificial Sequence
  Description of Artificial Sequence:  Enzymatic Nucleic Acid
cacggaagggctagctacaacgatggcagct

SEQ ID NO: 6385 - DNA, 31 bp, Artificial Sequence
  Description of Artificial Sequence:  Enzymatic Nucleic Acid
ggcaggcaggctagctacaacgaggaagctg

SEQ ID NO: 6386 - DNA, 31 bp, Artificial Sequence
  Description of Artificial Sequence:  Enzymatic Nucleic Acid
gcggcaggggctagctacaacgaacggaagc

SEQ ID NO: 6387 - DNA, 31 bp, Artificial Sequence
  Description of Artificial Sequence:  Enzymatic Nucleic Acid
ggttgcggggctagctacaacgaaggcacgg

SEQ ID NO: 6388 - DNA, 31 bp, Artificial Sequence
  Description of Artificial Sequence:  Enzymatic Nucleic Acid
tgaggttgggctagctacaacgaggcaggca

SEQ ID NO: 6389 - DNA, 31 bp, Artificial Sequence
  Description of Artificial Sequence:  Enzymatic Nucleic Acid
tgcagccaggctagctacaacgaaggatggt

SEQ ID NO: 6390 - DNA, 31 bp, Artificial Sequence
  Description of Artificial Sequence:  Enzymatic Nucleic Acid
gagtgcagggctagctacaacgacacaggat

SEQ ID NO: 6391 - DNA, 31 bp, Artificial Sequence
  Description of Artificial Sequence:  Enzymatic Nucleic Acid
ttcgagtgggctagctacaacgaagccacag

SEQ ID NO: 6392 - DNA, 31 bp, Artificial Sequence
  Description of Artificial Sequence:  Enzymatic Nucleic Acid
ggccagcaggctagctacaacgaattcgagt

SEQ ID NO: 6393 - DNA, 31 bp, Artificial Sequence
  Description of Artificial Sequence:  Enzymatic Nucleic Acid
cgggccagggctagctacaacgaacattcga

SEQ ID NO: 6394 - DNA, 31 bp, Artificial Sequence
  Description of Artificial Sequence:  Enzymatic Nucleic Acid
aattcgggggctagctacaacgacagcacat

SEQ ID NO: 6395 - DNA, 31 bp, Artificial Sequence
  Description of Artificial Sequence:  Enzymatic Nucleic Acid
ggcagccgggctagctacaacgaatcaattc

SEQ ID NO: 6396 - DNA, 31 bp, Artificial Sequence
  Description of Artificial Sequence:  Enzymatic Nucleic Acid
gaaggcagggctagctacaacgacgcatcaa

SEQ ID NO: 6397 - DNA, 31 bp, Artificial Sequence
  Description of Artificial Sequence:  Enzymatic Nucleic Acid
agtgaaggggctagctacaacgaagccgcat

SEQ ID NO: 6398 - DNA, 31 bp, Artificial Sequence
  Description of Artificial Sequence:  Enzymatic Nucleic Acid
gggccaggggctagctacaacgacagtgaag

SEQ ID NO: 6399 - DNA, 31 bp, Artificial Sequence
  Description of Artificial Sequence:  Enzymatic Nucleic Acid
caggagggggctagctacaacgacaggccag

SEQ ID NO: 6400 - DNA, 31 bp, Artificial Sequence
  Description of Artificial Sequence:  Enzymatic Nucleic Acid
tccagctgggctagctacaacgatccaggag

SEQ ID NO: 6401 - DNA, 31 bp, Artificial Sequence
  Description of Artificial Sequence:  Enzymatic Nucleic Acid
aggtccagggctagctacaacgatgctccag

SEQ ID NO: 6402 - DNA, 31 bp, Artificial Sequence
  Description of Artificial Sequence:  Enzymatic Nucleic Acid
cattatcgggctagctacaacgatgaggtcc

SEQ ID NO: 6403 - DNA, 31 bp, Artificial Sequence
  Description of Artificial Sequence:  Enzymatic Nucleic Acid
gagctgtgggctagctacaacgaattatcgc

SEQ ID NO: 6404 - DNA, 31 bp, Artificial Sequence
  Description of Artificial Sequence:  Enzymatic Nucleic Acid
gaccggagggctagctacaacgatgtgcatt

SEQ ID NO: 6405 - DNA, 31 bp, Artificial Sequence
  Description of Artificial Sequence:  Enzymatic Nucleic Acid
tccacagaggctagctacaacgacggagctg

SEQ ID NO: 6406 - DNA, 31 bp, Artificial Sequence
  Description of Artificial Sequence:  Enzymatic Nucleic Acid
agggtccaggctagctacaacgaagaccgga

SEQ ID NO: 6407 - DNA, 31 bp, Artificial Sequence
  Description of Artificial Sequence:  Enzymatic Nucleic Acid
gaatgtggggctagctacaacgaagggtcca

SEQ ID NO: 6408 - DNA, 31 bp, Artificial Sequence
  Description of Artificial Sequence:  Enzymatic Nucleic Acid
ggcccaggggctagctacaacgacgtggaat

SEQ ID NO: 6409 - DNA, 31 bp, Artificial Sequence
  Description of Artificial Sequence:  Enzymatic Nucleic Acid
gtaggcggggctagctacaacgaccaggccg

SEQ ID NO: 6410 - DNA, 31 bp, Artificial Sequence
  Description of Artificial Sequence:  Enzymatic Nucleic Acid
tgtgtaggggctagctacaacgaggcccagg

SEQ ID NO: 6411 - DNA, 31 bp, Artificial Sequence
  Description of Artificial Sequence:  Enzymatic Nucleic Acid
aggtgcagggctagctacaacgagtgtgtag

SEQ ID NO: 6412 - DNA, 31 bp, Artificial Sequence
  Description of Artificial Sequence:  Enzymatic Nucleic Acid
tccaggtgggctagctacaacgaagcgtgtg

SEQ ID NO: 6413 - DNA, 31 bp, Artificial Sequence
  Description of Artificial Sequence:  Enzymatic Nucleic Acid
ggccgcagggctagctacaacgaggtccagg

SEQ ID NO: 6414 - DNA, 31 bp, Artificial Sequence
  Description of Artificial Sequence:  Enzymatic Nucleic Acid
gcaggccgggctagctacaacgaagcggtcc

SEQ ID NO: 6415 - DNA, 31 bp, Artificial Sequence
  Description of Artificial Sequence:  Enzymatic Nucleic Acid
cctgcaggggctagctacaacgacgcagcgg

SEQ ID NO: 6416 - DNA, 31 bp, Artificial Sequence
  Description of Artificial Sequence:  Enzymatic Nucleic Acid
agctcctgggctagctacaacgaaggccgca

SEQ ID NO: 6417 - DNA, 31 bp, Artificial Sequence
  Description of Artificial Sequence:  Enzymatic Nucleic Acid
gggcccagggctagctacaacgatcctgcag

SEQ ID NO: 6418 - DNA, 31 bp, Artificial Sequence
  Description of Artificial Sequence:  Enzymatic Nucleic Acid
gccccgggggctagctacaacgaccagctcc

SEQ ID NO: 6419 - DNA, 31 bp, Artificial Sequence
  Description of Artificial Sequence:  Enzymatic Nucleic Acid
cggaacagggctagctacaacgacccgggcc

SEQ ID NO: 6420 - DNA, 31 bp, Artificial Sequence
  Description of Artificial Sequence:  Enzymatic Nucleic Acid
ccgcggaaggctagctacaacgaagccccgg

SEQ ID NO: 6421 - DNA, 31 bp, Artificial Sequence
  Description of Artificial Sequence:  Enzymatic Nucleic Acid
ccaggccgggctagctacaacgaggaacagc

SEQ ID NO: 6422 - DNA, 31 bp, Artificial Sequence
  Description of Artificial Sequence:  Enzymatic Nucleic Acid
cagccaggggctagctacaacgacgcggaac

SEQ ID NO: 6423 - DNA, 31 bp, Artificial Sequence
  Description of Artificial Sequence:  Enzymatic Nucleic Acid
cagggcagggctagctacaacgacaggccgc

SEQ ID NO: 6424 - DNA, 31 bp, Artificial Sequence
  Description of Artificial Sequence:  Enzymatic Nucleic Acid
ctgcagggggctagctacaacgaagccaggc

SEQ ID NO: 6425 - DNA, 31 bp, Artificial Sequence
  Description of Artificial Sequence:  Enzymatic Nucleic Acid
aggtactgggctagctacaacgaagggcagc

SEQ ID NO: 6426 - DNA, 31 bp, Artificial Sequence
  Description of Artificial Sequence:  Enzymatic Nucleic Acid
tagaggtaggctagctacaacgatgcagggc

SEQ ID NO: 6427 - DNA, 31 bp, Artificial Sequence
  Description of Artificial Sequence:  Enzymatic Nucleic Acid
ttgtcctgggctagctacaacgaaggtagag

SEQ ID NO: 6428 - DNA, 31 bp, Artificial Sequence
  Description of Artificial Sequence:  Enzymatic Nucleic Acid
ctgcagcgggctagctacaacgagttgtcct

SEQ ID NO: 6429 - DNA, 31 bp, Artificial Sequence
  Description of Artificial Sequence:  Enzymatic Nucleic Acid
gcctgcagggctagctacaacgagcgttgtc

SEQ ID NO: 6430 - DNA, 31 bp, Artificial Sequence
  Description of Artificial Sequence:  Enzymatic Nucleic Acid
agtgcctgggctagctacaacgaagcgcgtt

SEQ ID NO: 6431 - DNA, 31 bp, Artificial Sequence
  Description of Artificial Sequence:  Enzymatic Nucleic Acid
aggcagtgggctagctacaacgactgcagcg

SEQ ID NO: 6432 - DNA, 31 bp, Artificial Sequence
  Description of Artificial Sequence:  Enzymatic Nucleic Acid
tcatcaggggctagctacaacgaagtgcctg

SEQ ID NO: 6433 - DNA, 31 bp, Artificial Sequence
  Description of Artificial Sequence:  Enzymatic Nucleic Acid
ccaggtcgggctagctacaacgaggaaggtg

SEQ ID NO: 6434 - DNA, 31 bp, Artificial Sequence
  Description of Artificial Sequence:  Enzymatic Nucleic Acid
tgaggttgggctagctacaacgaccaggtcg

SEQ ID NO: 6435 - DNA, 31 bp, Artificial Sequence
  Description of Artificial Sequence:  Enzymatic Nucleic Acid
ttgccgtgggctagctacaacgaaggaagag

SEQ ID NO: 6436 - DNA, 31 bp, Artificial Sequence
  Description of Artificial Sequence:  Enzymatic Nucleic Acid
tggagatgggctagctacaacgaggttgccg

SEQ ID NO: 6437 - DNA, 31 bp, Artificial Sequence
  Description of Artificial Sequence:  Enzymatic Nucleic Acid
cgggcacgggctagctacaacgatggagatg

SEQ ID NO: 6438 - DNA, 31 bp, Artificial Sequence
  Description of Artificial Sequence:  Enzymatic Nucleic Acid
ctcgggcaggctagctacaacgagctggaga

SEQ ID NO: 6439 - DNA, 31 bp, Artificial Sequence
  Description of Artificial Sequence:  Enzymatic Nucleic Acid
cgctcgggggctagctacaacgaacgctgga

SEQ ID NO: 6440 - DNA, 31 bp, Artificial Sequence
  Description of Artificial Sequence:  Enzymatic Nucleic Acid
aaggcgcgggctagctacaacgatcgggcac

SEQ ID NO: 6441 - DNA, 31 bp, Artificial Sequence
  Description of Artificial Sequence:  Enzymatic Nucleic Acid
ggaaggcgggctagctacaacgagctcgggc

SEQ ID NO: 6442 - DNA, 31 bp, Artificial Sequence
  Description of Artificial Sequence:  Enzymatic Nucleic Acid
acggaaggggctagctacaacgagcgctcgg

SEQ ID NO: 6443 - DNA, 31 bp, Artificial Sequence
  Description of Artificial Sequence:  Enzymatic Nucleic Acid
gcagcccaggctagctacaacgaggaaggcg

SEQ ID NO: 6444 - DNA, 31 bp, Artificial Sequence
  Description of Artificial Sequence:  Enzymatic Nucleic Acid
ctgtgcagggctagctacaacgaccacggaa

SEQ ID NO: 6445 - DNA, 31 bp, Artificial Sequence
  Description of Artificial Sequence:  Enzymatic Nucleic Acid
aggctgtgggctagctacaacgaagcccacg

SEQ ID NO: 6446 - DNA, 31 bp, Artificial Sequence
  Description of Artificial Sequence:  Enzymatic Nucleic Acid
ggtcgaggggctagctacaacgatgtgcagc

SEQ ID NO: 6447 - DNA, 31 bp, Artificial Sequence
  Description of Artificial Sequence:  Enzymatic Nucleic Acid
gtaggagaggctagctacaacgaggtcgagg

SEQ ID NO: 6448 - DNA, 31 bp, Artificial Sequence
  Description of Artificial Sequence:  Enzymatic Nucleic Acid
ttctggtgggctagctacaacgaagtaggag

SEQ ID NO: 6449 - DNA, 31 bp, Artificial Sequence
  Description of Artificial Sequence:  Enzymatic Nucleic Acid
gggccacgggctagctacaacgaggttctgg

SEQ ID NO: 6450 - DNA, 31 bp, Artificial Sequence
  Description of Artificial Sequence:  Enzymatic Nucleic Acid
atgggccaggctagctacaacgagcggttct

SEQ ID NO: 6451 - DNA, 31 bp, Artificial Sequence
  Description of Artificial Sequence:  Enzymatic Nucleic Acid
cacatgggggctagctacaacgacacgcggt

SEQ ID NO: 6452 - DNA, 31 bp, Artificial Sequence
  Description of Artificial Sequence:  Enzymatic Nucleic Acid
cgggtgcaggctagctacaacgaatgggcca

SEQ ID NO: 6453 - DNA, 31 bp, Artificial Sequence
  Description of Artificial Sequence:  Enzymatic Nucleic Acid
tgcgggtgggctagctacaacgaacatgggc

SEQ ID NO: 6454 - DNA, 31 bp, Artificial Sequence
  Description of Artificial Sequence:  Enzymatic Nucleic Acid
aaggcatgggctagctacaacgagggtgcac

SEQ ID NO: 6455 - DNA, 31 bp, Artificial Sequence
  Description of Artificial Sequence:  Enzymatic Nucleic Acid
acggaaggggctagctacaacgaatgcgggt

SEQ ID NO: 6456 - DNA, 31 bp, Artificial Sequence
  Description of Artificial Sequence:  Enzymatic Nucleic Acid
caaggtcaggctagctacaacgaggaaggca

SEQ ID NO: 6457 - DNA, 31 bp, Artificial Sequence
  Description of Artificial Sequence:  Enzymatic Nucleic Acid
tgaggcggggctagctacaacgacaaggtca

SEQ ID NO: 6458 - DNA, 31 bp, Artificial Sequence
  Description of Artificial Sequence:  Enzymatic Nucleic Acid
tcatgaggggctagctacaacgaggccaagg

SEQ ID NO: 6459 - DNA, 31 bp, Artificial Sequence
  Description of Artificial Sequence:  Enzymatic Nucleic Acid
ttggcaaaggctagctacaacgaagatagag

SEQ ID NO: 6460 - DNA, 31 bp, Artificial Sequence
  Description of Artificial Sequence:  Enzymatic Nucleic Acid
attgttggggctagctacaacgaaaacagat

SEQ ID NO: 6461 - DNA, 31 bp, Artificial Sequence
  Description of Artificial Sequence:  Enzymatic Nucleic Acid
gggcagcgggctagctacaacgatgatagat

SEQ ID NO: 6462 - DNA, 31 bp, Artificial Sequence
  Description of Artificial Sequence:  Enzymatic Nucleic Acid
gtgggcagggctagctacaacgagctgatag

SEQ ID NO: 6463 - DNA, 31 bp, Artificial Sequence
  Description of Artificial Sequence:  Enzymatic Nucleic Acid
tcagtgggggctagctacaacgaagcgctga

SEQ ID NO: 6464 - DNA, 31 bp, Artificial Sequence
  Description of Artificial Sequence:  Enzymatic Nucleic Acid
ggccagggggctagctacaacgactcagtgg

SEQ ID NO: 6465 - DNA, 31 bp, Artificial Sequence
  Description of Artificial Sequence:  Enzymatic Nucleic Acid
caggggggggctagctacaacgacagggcct

SEQ ID NO: 6466 - DNA, 31 bp, Artificial Sequence
  Description of Artificial Sequence:  Enzymatic Nucleic Acid
agggcacgggctagctacaacgaaggggggc

SEQ ID NO: 6467 - DNA, 31 bp, Artificial Sequence
  Description of Artificial Sequence:  Enzymatic Nucleic Acid
gcagggcaggctagctacaacgagcaggggg

SEQ ID NO: 6468 - DNA, 31 bp, Artificial Sequence
  Description of Artificial Sequence:  Enzymatic Nucleic Acid
ctgcagggggctagctacaacgaacgcaggg

SEQ ID NO: 6469 - DNA, 31 bp, Artificial Sequence
  Description of Artificial Sequence:  Enzymatic Nucleic Acid
aggtactgggctagctacaacgaagggcacg

SEQ ID NO: 6470 - DNA, 31 bp, Artificial Sequence
  Description of Artificial Sequence:  Enzymatic Nucleic Acid
ctcaggtaggctagctacaacgatgcagggc

SEQ ID NO: 6471 - DNA, 31 bp, Artificial Sequence
  Description of Artificial Sequence:  Enzymatic Nucleic Acid
tcgttgagggctagctacaacgactcaggta

SEQ ID NO: 6472 - DNA, 31 bp, Artificial Sequence
  Description of Artificial Sequence:  Enzymatic Nucleic Acid
gtcacacaggctagctacaacgaccaggggt

SEQ ID NO: 6473 - DNA, 31 bp, Artificial Sequence
  Description of Artificial Sequence:  Enzymatic Nucleic Acid
cagtcacaggctagctacaacgaacccaggg

SEQ ID NO: 6474 - DNA, 31 bp, Artificial Sequence
  Description of Artificial Sequence:  Enzymatic Nucleic Acid
ggcagtcaggctagctacaacgaacacccag

SEQ ID NO: 6475 - DNA, 31 bp, Artificial Sequence
  Description of Artificial Sequence:  Enzymatic Nucleic Acid
gtgcccggggctagctacaacgaagtcacac

SEQ ID NO: 6476 - DNA, 31 bp, Artificial Sequence
  Description of Artificial Sequence:  Enzymatic Nucleic Acid
tgggcgtgggctagctacaacgaccggcagt

SEQ ID NO: 6477 - DNA, 31 bp, Artificial Sequence
  Description of Artificial Sequence:  Enzymatic Nucleic Acid
agagtgggggctagctacaacgagtgcccgg

SEQ ID NO: 6478 - DNA, 31 bp, Artificial Sequence
  Description of Artificial Sequence:  Enzymatic Nucleic Acid
cagccaggggctagctacaacgaccagagtg

SEQ ID NO: 6479 - DNA, 31 bp, Artificial Sequence
  Description of Artificial Sequence:  Enzymatic Nucleic Acid
ttctgcagggctagctacaacgacaggccca

SEQ ID NO: 6480 - DNA, 31 bp, Artificial Sequence
  Description of Artificial Sequence:  Enzymatic Nucleic Acid
aacttctgggctagctacaacgaagccaggc

SEQ ID NO: 6481 - DNA, 31 bp, Artificial Sequence
  Description of Artificial Sequence:  Enzymatic Nucleic Acid
ccgcggaaggctagctacaacgattctgcag

SEQ ID NO: 6482 - DNA, 31 bp, Artificial Sequence
  Description of Artificial Sequence:  Enzymatic Nucleic Acid
aggagccgggctagctacaacgaggaacttc

SEQ ID NO: 6483 - DNA, 31 bp, Artificial Sequence
  Description of Artificial Sequence:  Enzymatic Nucleic Acid
aggaggagggctagctacaacgacgcggaac

SEQ ID NO: 6484 - DNA, 31 bp, Artificial Sequence
  Description of Artificial Sequence:  Enzymatic Nucleic Acid
gcagggcaggctagctacaacgactcggagg

SEQ ID NO: 6485 - DNA, 31 bp, Artificial Sequence
  Description of Artificial Sequence:  Enzymatic Nucleic Acid
ctgcagggggctagctacaacgaacctcgga

SEQ ID NO: 6486 - DNA, 31 bp, Artificial Sequence
  Description of Artificial Sequence:  Enzymatic Nucleic Acid
ggaggctgggctagctacaacgaagggcacc

SEQ ID NO: 6487 - DNA, 31 bp, Artificial Sequence
  Description of Artificial Sequence:  Enzymatic Nucleic Acid
gcgggaggggctagctacaacgatgcagggc

SEQ ID NO: 6488 - DNA, 31 bp, Artificial Sequence
  Description of Artificial Sequence:  Enzymatic Nucleic Acid
aggcgttgggctagctacaacgagggaggct

SEQ ID NO: 6489 - DNA, 31 bp, Artificial Sequence
  Description of Artificial Sequence:  Enzymatic Nucleic Acid
cagccaggggctagctacaacgagttgcggg

SEQ ID NO: 6490 - DNA, 31 bp, Artificial Sequence
  Description of Artificial Sequence:  Enzymatic Nucleic Acid
acggccagggctagctacaacgacaggcgtt

SEQ ID NO: 6491 - DNA, 31 bp, Artificial Sequence
  Description of Artificial Sequence:  Enzymatic Nucleic Acid
ggtcacggggctagctacaacgacagccagg

SEQ ID NO: 6492 - DNA, 31 bp, Artificial Sequence
  Description of Artificial Sequence:  Enzymatic Nucleic Acid
tgaggtcaggctagctacaacgaggccagcc

SEQ ID NO: 6493 - DNA, 31 bp, Artificial Sequence
  Description of Artificial Sequence:  Enzymatic Nucleic Acid
cagctaggggctagctacaacgagtttgagg

SEQ ID NO: 6494 - DNA, 31 bp, Artificial Sequence
  Description of Artificial Sequence:  Enzymatic Nucleic Acid
attggcagggctagctacaacgataggcgtt

SEQ ID NO: 6495 - DNA, 31 bp, Artificial Sequence
  Description of Artificial Sequence:  Enzymatic Nucleic Acid
gtcattggggctagctacaacgaagctaggc

SEQ ID NO: 6496 - DNA, 31 bp, Artificial Sequence
  Description of Artificial Sequence:  Enzymatic Nucleic Acid
cagccctgggctagctacaacgaaggtcatt

SEQ ID NO: 6497 - DNA, 31 bp, Artificial Sequence
  Description of Artificial Sequence:  Enzymatic Nucleic Acid
cagcgcagggctagctacaacgacctgcagg

SEQ ID NO: 6498 - DNA, 31 bp, Artificial Sequence
  Description of Artificial Sequence:  Enzymatic Nucleic Acid
ccacagcgggctagctacaacgaagccctgc

SEQ ID NO: 6499 - DNA, 31 bp, Artificial Sequence
  Description of Artificial Sequence:  Enzymatic Nucleic Acid
ggccacagggctagctacaacgagcagccct

SEQ ID NO: 6500 - DNA, 31 bp, Artificial Sequence
  Description of Artificial Sequence:  Enzymatic Nucleic Acid
ggtggccaggctagctacaacgaagcgcagc

SEQ ID NO: 6501 - DNA, 31 bp, Artificial Sequence
  Description of Artificial Sequence:  Enzymatic Nucleic Acid
gccggtggggctagctacaacgacacagcgc

SEQ ID NO: 6502 - DNA, 31 bp, Artificial Sequence
  Description of Artificial Sequence:  Enzymatic Nucleic Acid
ggtaagggggctagctacaacgacggtggcc

SEQ ID NO: 6503 - DNA, 31 bp, Artificial Sequence
  Description of Artificial Sequence:  Enzymatic Nucleic Acid
tggccctgggctagctacaacgacggtccag

SEQ ID NO: 6504 - DNA, 31 bp, Artificial Sequence
  Description of Artificial Sequence:  Enzymatic Nucleic Acid
atcggtggggctagctacaacgacctgccgg

SEQ ID NO: 6505 - DNA, 31 bp, Artificial Sequence
  Description of Artificial Sequence:  Enzymatic Nucleic Acid
cccagcggggctagctacaacgatcctcatc

SEQ ID NO: 6506 - DNA, 31 bp, Artificial Sequence
  Description of Artificial Sequence:  Enzymatic Nucleic Acid
agccccagggctagctacaacgaggctcctc

SEQ ID NO: 6507 - DNA, 31 bp, Artificial Sequence
  Description of Artificial Sequence:  Enzymatic Nucleic Acid
ttgggaagggctagctacaacgacccagcgg

SEQ ID NO: 6508 - DNA, 31 bp, Artificial Sequence
  Description of Artificial Sequence:  Enzymatic Nucleic Acid
tggcagcaggctagctacaacgattgggaag

SEQ ID NO: 6509 - DNA, 31 bp, Artificial Sequence
  Description of Artificial Sequence:  Enzymatic Nucleic Acid
gctggcagggctagctacaacgaacttggga

SEQ ID NO: 6510 - DNA, 31 bp, Artificial Sequence
  Description of Artificial Sequence:  Enzymatic Nucleic Acid
ctggctggggctagctacaacgaagcacttg

SEQ ID NO: 6511 - DNA, 31 bp, Artificial Sequence
  Description of Artificial Sequence:  Enzymatic Nucleic Acid
gcatctggggctagctacaacgatggcagca

SEQ ID NO: 6512 - DNA, 31 bp, Artificial Sequence
  Description of Artificial Sequence:  Enzymatic Nucleic Acid
gtcagcggggctagctacaacgaatctggct

SEQ ID NO: 6513 - DNA, 31 bp, Artificial Sequence
  Description of Artificial Sequence:  Enzymatic Nucleic Acid
cttgtcagggctagctacaacgaggcatctg

SEQ ID NO: 6514 - DNA, 31 bp, Artificial Sequence
  Description of Artificial Sequence:  Enzymatic Nucleic Acid
tactgaggggctagctacaacgacttgtcag

SEQ ID NO: 6515 - DNA, 31 bp, Artificial Sequence
  Description of Artificial Sequence:  Enzymatic Nucleic Acid
ctccagtaggctagctacaacgatgaggcct

SEQ ID NO: 6516 - DNA, 31 bp, Artificial Sequence
  Description of Artificial Sequence:  Enzymatic Nucleic Acid
cttccaggggctagctacaacgatccagtac

SEQ ID NO: 6517 - DNA, 31 bp, Artificial Sequence
  Description of Artificial Sequence:  Enzymatic Nucleic Acid
tgccgaagggctagctacaacgatggtcttc

SEQ ID NO: 6518 - DNA, 31 bp, Artificial Sequence
  Description of Artificial Sequence:  Enzymatic Nucleic Acid
attgcctgggctagctacaacgacgaagctg

SEQ ID NO: 6519 - DNA, 31 bp, Artificial Sequence
  Description of Artificial Sequence:  Enzymatic Nucleic Acid
gcgcattgggctagctacaacgactgccgaa

SEQ ID NO: 6520 - DNA, 31 bp, Artificial Sequence
  Description of Artificial Sequence:  Enzymatic Nucleic Acid
cttcagcgggctagctacaacgaattgcctg

SEQ ID NO: 6521 - DNA, 31 bp, Artificial Sequence
  Description of Artificial Sequence:  Enzymatic Nucleic Acid
cccttcagggctagctacaacgagcattgcc

SEQ ID NO: 6522 - DNA, 31 bp, Artificial Sequence
  Description of Artificial Sequence:  Enzymatic Nucleic Acid
gcggcacgggctagctacaacgagtcccttc

SEQ ID NO: 6523 - DNA, 31 bp, Artificial Sequence
  Description of Artificial Sequence:  Enzymatic Nucleic Acid
gggcggcaggctagctacaacgagcgtccct

SEQ ID NO: 6524 - DNA, 31 bp, Artificial Sequence
  Description of Artificial Sequence:  Enzymatic Nucleic Acid
ccgggcggggctagctacaacgaacgcgtcc

SEQ ID NO: 6525 - DNA, 31 bp, Artificial Sequence
  Description of Artificial Sequence:  Enzymatic Nucleic Acid
tcaccgggggctagctacaacgaggcacgcg

SEQ ID NO: 6526 - DNA, 31 bp, Artificial Sequence
  Description of Artificial Sequence:  Enzymatic Nucleic Acid
ggctgtcaggctagctacaacgacgggcggc

SEQ ID NO: 6527 - DNA, 31 bp, Artificial Sequence
  Description of Artificial Sequence:  Enzymatic Nucleic Acid
ccggcgggggctagctacaacgatgtcaccg

SEQ ID NO: 6528 - DNA, 31 bp, Artificial Sequence
  Description of Artificial Sequence:  Enzymatic Nucleic Acid
ttgcccggggctagctacaacgagggctgtc

SEQ ID NO: 6529 - DNA, 31 bp, Artificial Sequence
  Description of Artificial Sequence:  Enzymatic Nucleic Acid
agccgttgggctagctacaacgaccggcggg

SEQ ID NO: 6530 - DNA, 31 bp, Artificial Sequence
  Description of Artificial Sequence:  Enzymatic Nucleic Acid
ggccagagggctagctacaacgacgttgccc

SEQ ID NO: 6531 - DNA, 31 bp, Artificial Sequence
  Description of Artificial Sequence:  Enzymatic Nucleic Acid
gccgtgggggctagctacaacgacagagccg

SEQ ID NO: 6532 - DNA, 31 bp, Artificial Sequence
  Description of Artificial Sequence:  Enzymatic Nucleic Acid
ttgatgtgggctagctacaacgacgtgggcc

SEQ ID NO: 6533 - DNA, 31 bp, Artificial Sequence
  Description of Artificial Sequence:  Enzymatic Nucleic Acid
gagccaggggctagctacaacgaagagtccc

SEQ ID NO: 6534 - DNA, 31 bp, Artificial Sequence
  Description of Artificial Sequence:  Enzymatic Nucleic Acid
cagcagagggctagctacaacgacaggcaga

SEQ ID NO: 6535 - DNA, 31 bp, Artificial Sequence
  Description of Artificial Sequence:  Enzymatic Nucleic Acid
gggctcagggctagctacaacgaagagccag

SEQ ID NO: 6536 - DNA, 31 bp, Artificial Sequence
  Description of Artificial Sequence:  Enzymatic Nucleic Acid
agcgggggggctagctacaacgatcagcaga

SEQ ID NO: 6537 - DNA, 31 bp, Artificial Sequence
  Description of Artificial Sequence:  Enzymatic Nucleic Acid
gcagtgagggctagctacaacgagggggctc

SEQ ID NO: 6538 - DNA, 31 bp, Artificial Sequence
  Description of Artificial Sequence:  Enzymatic Nucleic Acid
ccgcactgggctagctacaacgaagtgagcg

SEQ ID NO: 6539 - DNA, 31 bp, Artificial Sequence
  Description of Artificial Sequence:  Enzymatic Nucleic Acid
gggccgcaggctagctacaacgatgcagtga

SEQ ID NO: 6540 - DNA, 31 bp, Artificial Sequence
  Description of Artificial Sequence:  Enzymatic Nucleic Acid
tcgggccgggctagctacaacgaactgcagt

SEQ ID NO: 6541 - DNA, 31 bp, Artificial Sequence
  Description of Artificial Sequence:  Enzymatic Nucleic Acid
ccctcgggggctagctacaacgacgcactgc

SEQ ID NO: 6542 - DNA, 31 bp, Artificial Sequence
  Description of Artificial Sequence:  Enzymatic Nucleic Acid
gctcggagggctagctacaacgacctcgggc

SEQ ID NO: 6543 - DNA, 31 bp, Artificial Sequence
  Description of Artificial Sequence:  Enzymatic Nucleic Acid
cctggtggggctagctacaacgatcggagcc

SEQ ID NO: 6544 - DNA, 31 bp, Artificial Sequence
  Description of Artificial Sequence:  Enzymatic Nucleic Acid
gtggggaaggctagctacaacgacctggtgg

SEQ ID NO: 6545 - DNA, 31 bp, Artificial Sequence
  Description of Artificial Sequence:  Enzymatic Nucleic Acid
ggcgagggggctagctacaacgaccgaggtg

SEQ ID NO: 6546 - DNA, 31 bp, Artificial Sequence
  Description of Artificial Sequence:  Enzymatic Nucleic Acid
gcctccggggctagctacaacgagagggccc

SEQ ID NO: 6547 - DNA, 31 bp, Artificial Sequence
  Description of Artificial Sequence:  Enzymatic Nucleic Acid
cagcctggggctagctacaacgactccggcg

SEQ ID NO: 6548 - DNA, 31 bp, Artificial Sequence
  Description of Artificial Sequence:  Enzymatic Nucleic Acid
gtgaacagggctagctacaacgactggcctc

SEQ ID NO: 6549 - DNA, 31 bp, Artificial Sequence
  Description of Artificial Sequence:  Enzymatic Nucleic Acid
tgcgtgaaggctagctacaacgaagcctggc

SEQ ID NO: 6550 - DNA, 31 bp, Artificial Sequence
  Description of Artificial Sequence:  Enzymatic Nucleic Acid
ggttcttgggctagctacaacgagtgaacag

SEQ ID NO: 6551 - DNA, 31 bp, Artificial Sequence
  Description of Artificial Sequence:  Enzymatic Nucleic Acid
tgcgggtgggctagctacaacgaggttcttg

SEQ ID NO: 6552 - DNA, 31 bp, Artificial Sequence
  Description of Artificial Sequence:  Enzymatic Nucleic Acid
agtggctgggctagctacaacgagggtgcgg

SEQ ID NO: 6553 - DNA, 31 bp, Artificial Sequence
  Description of Artificial Sequence:  Enzymatic Nucleic Acid
ggcagtggggctagctacaacgatgcgggtg

SEQ ID NO: 6554 - DNA, 31 bp, Artificial Sequence
  Description of Artificial Sequence:  Enzymatic Nucleic Acid
ccagacggggctagctacaacgaagtggctg

SEQ ID NO: 6555 - DNA, 31 bp, Artificial Sequence
  Description of Artificial Sequence:  Enzymatic Nucleic Acid
ggcccagaggctagctacaacgaggcagtgg

SEQ ID NO: 6556 - DNA, 31 bp, Artificial Sequence
  Description of Artificial Sequence:  Enzymatic Nucleic Acid
ctgcctggggctagctacaacgaccagacgg

SEQ ID NO: 6557 - DNA, 31 bp, Artificial Sequence
  Description of Artificial Sequence:  Enzymatic Nucleic Acid
gctgcctgggctagctacaacgactggccca

SEQ ID NO: 6558 - DNA, 31 bp, Artificial Sequence
  Description of Artificial Sequence:  Enzymatic Nucleic Acid
ccccgctgggctagctacaacgactgcctgg

SEQ ID NO: 6559 - DNA, 31 bp, Artificial Sequence
  Description of Artificial Sequence:  Enzymatic Nucleic Acid
cacccccgggctagctacaacgatgcctgcc

SEQ ID NO: 6560 - DNA, 31 bp, Artificial Sequence
  Description of Artificial Sequence:  Enzymatic Nucleic Acid
tcccgccaggctagctacaacgaccccgctg

SEQ ID NO: 6561 - DNA, 31 bp, Artificial Sequence
  Description of Artificial Sequence:  Enzymatic Nucleic Acid
cagtcccgggctagctacaacgacacccccg

SEQ ID NO: 6562 - DNA, 31 bp, Artificial Sequence
  Description of Artificial Sequence:  Enzymatic Nucleic Acid
ctgagtcaggctagctacaacgacagtcccg

SEQ ID NO: 6563 - DNA, 31 bp, Artificial Sequence
  Description of Artificial Sequence:  Enzymatic Nucleic Acid
cacctgagggctagctacaacgacttctgag

SEQ ID NO: 6564 - DNA, 31 bp, Artificial Sequence
  Description of Artificial Sequence:  Enzymatic Nucleic Acid
gtagggcaggctagctacaacgactgagcct

SEQ ID NO: 6565 - DNA, 31 bp, Artificial Sequence
  Description of Artificial Sequence:  Enzymatic Nucleic Acid
gggtagggggctagctacaacgaacctgagc

SEQ ID NO: 6566 - DNA, 31 bp, Artificial Sequence
  Description of Artificial Sequence:  Enzymatic Nucleic Acid
aggtgaggggctagctacaacgatgggtagg

SEQ ID NO: 6567 - DNA, 31 bp, Artificial Sequence
  Description of Artificial Sequence:  Enzymatic Nucleic Acid
tgaggctgggctagctacaacgaaggtgagg

SEQ ID NO: 6568 - DNA, 31 bp, Artificial Sequence
  Description of Artificial Sequence:  Enzymatic Nucleic Acid
gggtgaggggctagctacaacgatgcaggtg

SEQ ID NO: 6569 - DNA, 31 bp, Artificial Sequence
  Description of Artificial Sequence:  Enzymatic Nucleic Acid
gcgccaggggctagctacaacgaccaggggg

SEQ ID NO: 6570 - DNA, 31 bp, Artificial Sequence
  Description of Artificial Sequence:  Enzymatic Nucleic Acid
caccagcgggctagctacaacgacaggccca

SEQ ID NO: 6571 - DNA, 31 bp, Artificial Sequence
  Description of Artificial Sequence:  Enzymatic Nucleic Acid
agcaccagggctagctacaacgagccaggcc

SEQ ID NO: 6572 - DNA, 31 bp, Artificial Sequence
  Description of Artificial Sequence:  Enzymatic Nucleic Acid
ccacagcaggctagctacaacgacagcgcca

SEQ ID NO: 6573 - DNA, 31 bp, Artificial Sequence
  Description of Artificial Sequence:  Enzymatic Nucleic Acid
gtccacagggctagctacaacgaaccagcgc

SEQ ID NO: 6574 - DNA, 31 bp, Artificial Sequence
  Description of Artificial Sequence:  Enzymatic Nucleic Acid
actgtccaggctagctacaacgaagcaccag

SEQ ID NO: 6575 - DNA, 31 bp, Artificial Sequence
  Description of Artificial Sequence:  Enzymatic Nucleic Acid
cccaagcaggctagctacaacgatgtccaca

SEQ ID NO: 6576 - DNA, 31 bp, Artificial Sequence
  Description of Artificial Sequence:  Enzymatic Nucleic Acid
ggcccaagggctagctacaacgaactgtcca

SEQ ID NO: 6577 - DNA, 31 bp, Artificial Sequence
  Description of Artificial Sequence:  Enzymatic Nucleic Acid
cagcagggggctagctacaacgaccaagcac

SEQ ID NO: 6578 - DNA, 31 bp, Artificial Sequence
  Description of Artificial Sequence:  Enzymatic Nucleic Acid
ggggtcagggctagctacaacgaagggccca

SEQ ID NO: 6579 - DNA, 31 bp, Artificial Sequence
  Description of Artificial Sequence:  Enzymatic Nucleic Acid
cctcttcaggctagctacaacgacgtagggg

SEQ ID NO: 6580 - DNA, 31 bp, Artificial Sequence
  Description of Artificial Sequence:  Enzymatic Nucleic Acid
tgggctcaggctagctacaacgatgtagcat

SEQ ID NO: 6581 - DNA, 31 bp, Artificial Sequence
  Description of Artificial Sequence:  Enzymatic Nucleic Acid
gcttgtcgggctagctacaacgacaccttgg

SEQ ID NO: 6582 - DNA, 31 bp, Artificial Sequence
  Description of Artificial Sequence:  Enzymatic Nucleic Acid
gcagcttgggctagctacaacgacgtcacct

SEQ ID NO: 6583 - DNA, 31 bp, Artificial Sequence
  Description of Artificial Sequence:  Enzymatic Nucleic Acid
agatgcggggctagctacaacgatgccgtgc

SEQ ID NO: 6584 - DNA, 31 bp, Artificial Sequence
  Description of Artificial Sequence:  Enzymatic Nucleic Acid
tggtgaggggctagctacaacgatgcggcag

SEQ ID NO: 6585 - DNA, 31 bp, Artificial Sequence
  Description of Artificial Sequence:  Enzymatic Nucleic Acid
ccagcacaggctagctacaacgatcgagtgc

SEQ ID NO: 6586 - DNA, 31 bp, Artificial Sequence
  Description of Artificial Sequence:  Enzymatic Nucleic Acid
cgcatcaaggctagctacaacgatcgggcca

SEQ ID NO: 6587 - DNA, 31 bp, Artificial Sequence
  Description of Artificial Sequence:  Enzymatic Nucleic Acid
cagccgcaggctagctacaacgacaattcgg

SEQ ID NO: 6588 - DNA, 31 bp, Artificial Sequence
  Description of Artificial Sequence:  Enzymatic Nucleic Acid
cgctgaggggctagctacaacgaccagctgc

SEQ ID NO: 6589 - DNA, 31 bp, Artificial Sequence
  Description of Artificial Sequence:  Enzymatic Nucleic Acid
gtgcattaggctagctacaacgacgctgagg

SEQ ID NO: 6590 - DNA, 31 bp, Artificial Sequence
  Description of Artificial Sequence:  Enzymatic Nucleic Acid
gctgtgcaggctagctacaacgatatcgctg

SEQ ID NO: 6591 - DNA, 31 bp, Artificial Sequence
  Description of Artificial Sequence:  Enzymatic Nucleic Acid
tggcagggggctagctacaacgaccacagac

SEQ ID NO: 6592 - DNA, 31 bp, Artificial Sequence
  Description of Artificial Sequence:  Enzymatic Nucleic Acid
cgcagcggggctagctacaacgaccaggtgc

SEQ ID NO: 6593 - DNA, 31 bp, Artificial Sequence
  Description of Artificial Sequence:  Enzymatic Nucleic Acid
gcgcgttgggctagctacaacgacctgcagg

SEQ ID NO: 6594 - DNA, 31 bp, Artificial Sequence
  Description of Artificial Sequence:  Enzymatic Nucleic Acid
gcagcgcgggctagctacaacgatgtcctgc

SEQ ID NO: 6595 - DNA, 31 bp, Artificial Sequence
  Description of Artificial Sequence:  Enzymatic Nucleic Acid
aggtgtcaggctagctacaacgacaggcagt

SEQ ID NO: 6596 - DNA, 31 bp, Artificial Sequence
  Description of Artificial Sequence:  Enzymatic Nucleic Acid
ggaaggtgggctagctacaacgacatcaggc

SEQ ID NO: 6597 - DNA, 31 bp, Artificial Sequence
  Description of Artificial Sequence:  Enzymatic Nucleic Acid
tgcccaggggctagctacaacgacgcggaag

SEQ ID NO: 6598 - DNA, 31 bp, Artificial Sequence
  Description of Artificial Sequence:  Enzymatic Nucleic Acid
gtgtgaggggctagctacaacgatgcccagg

SEQ ID NO: 6599 - DNA, 31 bp, Artificial Sequence
  Description of Artificial Sequence:  Enzymatic Nucleic Acid
ggagacggggctagctacaacgacgaggctg

SEQ ID NO: 6600 - DNA, 31 bp, Artificial Sequence
  Description of Artificial Sequence:  Enzymatic Nucleic Acid
ccacgcggggctagctacaacgatctggtgc

SEQ ID NO: 6601 - DNA, 31 bp, Artificial Sequence
  Description of Artificial Sequence:  Enzymatic Nucleic Acid
ggccaaggggctagctacaacgacacggaag

SEQ ID NO: 6602 - DNA, 31 bp, Artificial Sequence
  Description of Artificial Sequence:  Enzymatic Nucleic Acid
atagagtgggctagctacaacgacatgaggc

SEQ ID NO: 6603 - DNA, 31 bp, Artificial Sequence
  Description of Artificial Sequence:  Enzymatic Nucleic Acid
atagattgggctagctacaacgatggcaaac

SEQ ID NO: 6604 - DNA, 31 bp, Artificial Sequence
  Description of Artificial Sequence:  Enzymatic Nucleic Acid
ctgatagaggctagctacaacgatgttggca

SEQ ID NO: 6605 - DNA, 31 bp, Artificial Sequence
  Description of Artificial Sequence:  Enzymatic Nucleic Acid
ggttgtcgggctagctacaacgatgagcctc

SEQ ID NO: 6606 - DNA, 31 bp, Artificial Sequence
  Description of Artificial Sequence:  Enzymatic Nucleic Acid
aggggttgggctagctacaacgacgttgagc

SEQ ID NO: 6607 - DNA, 31 bp, Artificial Sequence
  Description of Artificial Sequence:  Enzymatic Nucleic Acid
cccaggggggctagctacaacgatgtcgttg

SEQ ID NO: 6608 - DNA, 31 bp, Artificial Sequence
  Description of Artificial Sequence:  Enzymatic Nucleic Acid
cccggcagggctagctacaacgacacacacc

SEQ ID NO: 6609 - DNA, 31 bp, Artificial Sequence
  Description of Artificial Sequence:  Enzymatic Nucleic Acid
gccaggcgggctagctacaacgatgcgggag

SEQ ID NO: 6610 - DNA, 31 bp, Artificial Sequence
  Description of Artificial Sequence:  Enzymatic Nucleic Acid
gtttgaggggctagctacaacgacacggcca

SEQ ID NO: 6611 - DNA, 31 bp, Artificial Sequence
  Description of Artificial Sequence:  Enzymatic Nucleic Acid
gctaggcgggctagctacaacgattgaggtc

SEQ ID NO: 6612 - DNA, 31 bp, Artificial Sequence
  Description of Artificial Sequence:  Enzymatic Nucleic Acid
gcaggtcaggctagctacaacgatggcagct

SEQ ID NO: 6613 - DNA, 31 bp, Artificial Sequence
  Description of Artificial Sequence:  Enzymatic Nucleic Acid
cctgcaggggctagctacaacgacattggca

SEQ ID NO: 6614 - DNA, 31 bp, Artificial Sequence
  Description of Artificial Sequence:  Enzymatic Nucleic Acid
cctgccggggctagctacaacgaccagatgg

SEQ ID NO: 6615 - DNA, 31 bp, Artificial Sequence
  Description of Artificial Sequence:  Enzymatic Nucleic Acid
gctcctcaggctagctacaacgacggtggcc

SEQ ID NO: 6616 - DNA, 31 bp, Artificial Sequence
  Description of Artificial Sequence:  Enzymatic Nucleic Acid
cagcggcaggctagctacaacgactggctgg

SEQ ID NO: 6617 - DNA, 31 bp, Artificial Sequence
  Description of Artificial Sequence:  Enzymatic Nucleic Acid
aggccttgggctagctacaacgacagcggca

SEQ ID NO: 6618 - DNA, 31 bp, Artificial Sequence
  Description of Artificial Sequence:  Enzymatic Nucleic Acid
gaagctggggctagctacaacgacttccagg

SEQ ID NO: 6619 - DNA, 31 bp, Artificial Sequence
  Description of Artificial Sequence:  Enzymatic Nucleic Acid
tcagcgcaggctagctacaacgatgcctgcc

SEQ ID NO: 6620 - DNA, 31 bp, Artificial Sequence
  Description of Artificial Sequence:  Enzymatic Nucleic Acid
ggcacgcgggctagctacaacgacccttcag

SEQ ID NO: 6621 - DNA, 31 bp, Artificial Sequence
  Description of Artificial Sequence:  Enzymatic Nucleic Acid
gcgggctgggctagctacaacgacaccgggc

SEQ ID NO: 6622 - DNA, 31 bp, Artificial Sequence
  Description of Artificial Sequence:  Enzymatic Nucleic Acid
cagagccgggctagctacaacgatgcccggc

SEQ ID NO: 6623 - DNA, 31 bp, Artificial Sequence
  Description of Artificial Sequence:  Enzymatic Nucleic Acid
gtgagtcaggctagctacaacgatgatgtgc

SEQ ID NO: 6624 - DNA, 31 bp, Artificial Sequence
  Description of Artificial Sequence:  Enzymatic Nucleic Acid
agggtgagggctagctacaacgacattgatg

SEQ ID NO: 6625 - DNA, 31 bp, Artificial Sequence
  Description of Artificial Sequence:  Enzymatic Nucleic Acid
aggcagagggctagctacaacgacccaaagg

SEQ ID NO: 6626 - DNA, 31 bp, Artificial Sequence
  Description of Artificial Sequence:  Enzymatic Nucleic Acid
gggtgcggggctagctacaacgatcttgcgt

SEQ ID NO: 6627 - DNA, 31 bp, Artificial Sequence
  Description of Artificial Sequence:  Enzymatic Nucleic Acid
gtcaccagggctagctacaacgacccgccac

SEQ ID NO: 6628 - DNA, 31 bp, Artificial Sequence
  Description of Artificial Sequence:  Enzymatic Nucleic Acid
cttctgagggctagctacaacgacaccagtc

SEQ ID NO: 6629 - DNA, 31 bp, Artificial Sequence
  Description of Artificial Sequence:  Enzymatic Nucleic Acid
aagcactgggctagctacaacgaccacagca

SEQ ID NO: 6630 - RNA, 48 nt, Artificial Sequence
  Description of Artificial Sequence:  Enzymatic Nucleic Acid
agcggacgggaggaaacucccuucaaggacaucguccgggccucuuca

SEQ ID NO: 6631 - RNA, 48 nt, Artificial Sequence
  Description of Artificial Sequence:  Enzymatic Nucleic Acid
ccagcggaggaggaaacucccuucaaggacaucguccggggcccucuu

SEQ ID NO: 6632 - RNA, 48 nt, Artificial Sequence
  Description of Artificial Sequence:  Enzymatic Nucleic Acid
cccuccagggaggaaacucccuucaaggacaucguccgggggacgccc

SEQ ID NO: 6633 - RNA, 48 nt, Artificial Sequence
  Description of Artificial Sequence:  Enzymatic Nucleic Acid
gcagccggggaggaaacucccuucaaggacaucguccgggucccucca

SEQ ID NO: 6634 - RNA, 48 nt, Artificial Sequence
  Description of Artificial Sequence:  Enzymatic Nucleic Acid
gccagcagggaggaaacucccuucaaggacaucguccgggcggcuccc

SEQ ID NO: 6635 - RNA, 48 nt, Artificial Sequence
  Description of Artificial Sequence:  Enzymatic Nucleic Acid
caugccagggaggaaacucccuucaaggacaucguccgggagccggcu

SEQ ID NO: 6636 - RNA, 48 nt, Artificial Sequence
  Description of Artificial Sequence:  Enzymatic Nucleic Acid
cacccaugggaggaaacucccuucaaggacaucguccgggcagcagcc

SEQ ID NO: 6637 - RNA, 48 nt, Artificial Sequence
  Description of Artificial Sequence:  Enzymatic Nucleic Acid
ccacagcaggaggaaacucccuucaaggacaucguccgggccaugcca

SEQ ID NO: 6638 - RNA, 48 nt, Artificial Sequence
  Description of Artificial Sequence:  Enzymatic Nucleic Acid
agccacagggaggaaacucccuucaaggacaucguccgggacccaugc

SEQ ID NO: 6639 - RNA, 48 nt, Artificial Sequence
  Description of Artificial Sequence:  Enzymatic Nucleic Acid
ugcagccaggaggaaacucccuucaaggacaucguccgggagcaccca

SEQ ID NO: 6640 - RNA, 48 nt, Artificial Sequence
  Description of Artificial Sequence:  Enzymatic Nucleic Acid
gccugcagggaggaaacucccuucaaggacaucguccgggcacagcac

SEQ ID NO: 6641 - RNA, 48 nt, Artificial Sequence
  Description of Artificial Sequence:  Enzymatic Nucleic Acid
caggccugggaggaaacucccuucaaggacaucguccgggagccacag

SEQ ID NO: 6642 - RNA, 48 nt, Artificial Sequence
  Description of Artificial Sequence:  Enzymatic Nucleic Acid
cugccaggggaggaaacucccuucaaggacaucguccgggcugcagcc

SEQ ID NO: 6643 - RNA, 48 nt, Artificial Sequence
  Description of Artificial Sequence:  Enzymatic Nucleic Acid
gccaccugggaggaaacucccuucaaggacaucguccgggcaggccug

SEQ ID NO: 6644 - RNA, 48 nt, Artificial Sequence
  Description of Artificial Sequence:  Enzymatic Nucleic Acid
ggcugccaggaggaaacucccuucaaggacaucguccgggcugccagg

SEQ ID NO: 6645 - RNA, 48 nt, Artificial Sequence
  Description of Artificial Sequence:  Enzymatic Nucleic Acid
uggggcugggaggaaacucccuucaaggacaucguccgggcaccugcc

SEQ ID NO: 6646 - RNA, 48 nt, Artificial Sequence
  Description of Artificial Sequence:  Enzymatic Nucleic Acid
gcauggggggaggaaacucccuucaaggacaucguccgggugccaccu

SEQ ID NO: 6647 - RNA, 48 nt, Artificial Sequence
  Description of Artificial Sequence:  Enzymatic Nucleic Acid
caccugggggaggaaacucccuucaaggacaucguccgggauggggcu

SEQ ID NO: 6648 - RNA, 48 nt, Artificial Sequence
  Description of Artificial Sequence:  Enzymatic Nucleic Acid
cgcaggcaggaggaaacucccuucaaggacaucguccgggcugggcau

SEQ ID NO: 6649 - RNA, 48 nt, Artificial Sequence
  Description of Artificial Sequence:  Enzymatic Nucleic Acid
uacgcaggggaggaaacucccuucaaggacaucguccgggaccugggc

SEQ ID NO: 6650 - RNA, 48 nt, Artificial Sequence
  Description of Artificial Sequence:  Enzymatic Nucleic Acid
agcauacgggaggaaacucccuucaaggacaucguccgggaggcaccu

SEQ ID NO: 6651 - RNA, 48 nt, Artificial Sequence
  Description of Artificial Sequence:  Enzymatic Nucleic Acid
guagcauaggaggaaacucccuucaaggacaucguccggggcaggcac

SEQ ID NO: 6652 - RNA, 48 nt, Artificial Sequence
  Description of Artificial Sequence:  Enzymatic Nucleic Acid
cauuguagggaggaaacucccuucaaggacaucguccgggauacgcag

SEQ ID NO: 6653 - RNA, 48 nt, Artificial Sequence
  Description of Artificial Sequence:  Enzymatic Nucleic Acid
accuugggggaggaaacucccuucaaggacaucguccgggucauugua

SEQ ID NO: 6654 - RNA, 48 nt, Artificial Sequence
  Description of Artificial Sequence:  Enzymatic Nucleic Acid
ugucgucaggaggaaacucccuucaaggacaucguccgggcuugggcu

SEQ ID NO: 6655 - RNA, 48 nt, Artificial Sequence
  Description of Artificial Sequence:  Enzymatic Nucleic Acid
gggggcagggaggaaacucccuucaaggacaucguccggguugucguc

SEQ ID NO: 6656 - RNA, 48 nt, Artificial Sequence
  Description of Artificial Sequence:  Enzymatic Nucleic Acid
gcugggggggaggaaacucccuucaaggacaucguccgggagcuuguc

SEQ ID NO: 6657 - RNA, 48 nt, Artificial Sequence
  Description of Artificial Sequence:  Enzymatic Nucleic Acid
aggcccugggaggaaacucccuucaaggacaucguccgggugggggca

SEQ ID NO: 6658 - RNA, 48 nt, Artificial Sequence
  Description of Artificial Sequence:  Enzymatic Nucleic Acid
ccugcaggggaggaaacucccuucaaggacaucguccgggccugcugg

SEQ ID NO: 6659 - RNA, 48 nt, Artificial Sequence
  Description of Artificial Sequence:  Enzymatic Nucleic Acid
acagccugggaggaaacucccuucaaggacaucguccgggaggcccug

SEQ ID NO: 6660 - RNA, 48 nt, Artificial Sequence
  Description of Artificial Sequence:  Enzymatic Nucleic Acid
gggcacagggaggaaacucccuucaaggacaucguccgggcugcaggc

SEQ ID NO: 6661 - RNA, 48 nt, Artificial Sequence
  Description of Artificial Sequence:  Enzymatic Nucleic Acid
cacgggcaggaggaaacucccuucaaggacaucguccgggagccugca

SEQ ID NO: 6662 - RNA, 48 nt, Artificial Sequence
  Description of Artificial Sequence:  Enzymatic Nucleic Acid
cccacgggggaggaaacucccuucaaggacaucguccgggacagccug

SEQ ID NO: 6663 - RNA, 48 nt, Artificial Sequence
  Description of Artificial Sequence:  Enzymatic Nucleic Acid
gaugcccaggaggaaacucccuucaaggacaucguccggggggcacag

SEQ ID NO: 6664 - RNA, 48 nt, Artificial Sequence
  Description of Artificial Sequence:  Enzymatic Nucleic Acid
cagggaugggaggaaacucccuucaaggacaucguccgggccacgggc

SEQ ID NO: 6665 - RNA, 48 nt, Artificial Sequence
  Description of Artificial Sequence:  Enzymatic Nucleic Acid
gcuggcagggaggaaacucccuucaaggacaucguccgggagggaugc

SEQ ID NO: 6666 - RNA, 48 nt, Artificial Sequence
  Description of Artificial Sequence:  Enzymatic Nucleic Acid
cuggcuggggaggaaacucccuucaaggacaucguccgggagcaggga

SEQ ID NO: 6667 - RNA, 48 nt, Artificial Sequence
  Description of Artificial Sequence:  Enzymatic Nucleic Acid
ugcgcuggggaggaaacucccuucaaggacaucguccggguggcagca

SEQ ID NO: 6668 - RNA, 48 nt, Artificial Sequence
  Description of Artificial Sequence:  Enzymatic Nucleic Acid
aagaugcgggaggaaacucccuucaaggacaucguccggguggcuggc

SEQ ID NO: 6669 - RNA, 48 nt, Artificial Sequence
  Description of Artificial Sequence:  Enzymatic Nucleic Acid
ggaagaugggaggaaacucccuucaaggacaucguccggggcuggcug

SEQ ID NO: 6670 - RNA, 48 nt, Artificial Sequence
  Description of Artificial Sequence:  Enzymatic Nucleic Acid
uugccgugggaggaaacucccuucaaggacaucguccgggaggaagau

SEQ ID NO: 6671 - RNA, 48 nt, Artificial Sequence
  Description of Artificial Sequence:  Enzymatic Nucleic Acid
ugcgguugggaggaaacucccuucaaggacaucguccgggcgugcagg

SEQ ID NO: 6672 - RNA, 48 nt, Artificial Sequence
  Description of Artificial Sequence:  Enzymatic Nucleic Acid
gcgagaugggaggaaacucccuucaaggacaucguccggggguugccg

SEQ ID NO: 6673 - RNA, 48 nt, Artificial Sequence
  Description of Artificial Sequence:  Enzymatic Nucleic Acid
ggcacaugggaggaaacucccuucaaggacaucguccggggagaugcg

SEQ ID NO: 6674 - RNA, 48 nt, Artificial Sequence
  Description of Artificial Sequence:  Enzymatic Nucleic Acid
agcuggcaggaggaaacucccuucaaggacaucguccgggaugcgaga

SEQ ID NO: 6675 - RNA, 48 nt, Artificial Sequence
  Description of Artificial Sequence:  Enzymatic Nucleic Acid
gcagcuggggaggaaacucccuucaaggacaucguccgggacaugcga

SEQ ID NO: 6676 - RNA, 48 nt, Artificial Sequence
  Description of Artificial Sequence:  Enzymatic Nucleic Acid
gcuggcagggaggaaacucccuucaaggacaucguccggguggcacau

SEQ ID NO: 6677 - RNA, 48 nt, Artificial Sequence
  Description of Artificial Sequence:  Enzymatic Nucleic Acid
gaagcuggggaggaaacucccuucaaggacaucguccgggagcuggca

SEQ ID NO: 6678 - RNA, 48 nt, Artificial Sequence
  Description of Artificial Sequence:  Enzymatic Nucleic Acid
cacggaagggaggaaacucccuucaaggacaucguccggguggcagcu

SEQ ID NO: 6679 - RNA, 48 nt, Artificial Sequence
  Description of Artificial Sequence:  Enzymatic Nucleic Acid
ggcaggcaggaggaaacucccuucaaggacaucguccgggggaagcug

SEQ ID NO: 6680 - RNA, 48 nt, Artificial Sequence
  Description of Artificial Sequence:  Enzymatic Nucleic Acid
gcggcaggggaggaaacucccuucaaggacaucguccgggacggaagc

SEQ ID NO: 6681 - RNA, 48 nt, Artificial Sequence
  Description of Artificial Sequence:  Enzymatic Nucleic Acid
gguugcggggaggaaacucccuucaaggacaucguccgggaggcacgg

SEQ ID NO: 6682 - RNA, 48 nt, Artificial Sequence
  Description of Artificial Sequence:  Enzymatic Nucleic Acid
ugagguugggaggaaacucccuucaaggacaucguccgggggcaggca

SEQ ID NO: 6683 - RNA, 48 nt, Artificial Sequence
  Description of Artificial Sequence:  Enzymatic Nucleic Acid
ugcagccaggaggaaacucccuucaaggacaucguccgggaggauggu

SEQ ID NO: 6684 - RNA, 48 nt, Artificial Sequence
  Description of Artificial Sequence:  Enzymatic Nucleic Acid
gagugcagggaggaaacucccuucaaggacaucguccgggcacaggau

SEQ ID NO: 6685 - RNA, 48 nt, Artificial Sequence
  Description of Artificial Sequence:  Enzymatic Nucleic Acid
uucgagugggaggaaacucccuucaaggacaucguccgggagccacag

SEQ ID NO: 6686 - RNA, 48 nt, Artificial Sequence
  Description of Artificial Sequence:  Enzymatic Nucleic Acid
ggccagcaggaggaaacucccuucaaggacaucguccgggauucgagu

SEQ ID NO: 6687 - RNA, 48 nt, Artificial Sequence
  Description of Artificial Sequence:  Enzymatic Nucleic Acid
cgggccagggaggaaacucccuucaaggacaucguccgggacauucga

SEQ ID NO: 6688 - RNA, 48 nt, Artificial Sequence
  Description of Artificial Sequence:  Enzymatic Nucleic Acid
aauucgggggaggaaacucccuucaaggacaucguccgggcagcacau

SEQ ID NO: 6689 - RNA, 48 nt, Artificial Sequence
  Description of Artificial Sequence:  Enzymatic Nucleic Acid
ggcagccgggaggaaacucccuucaaggacaucguccgggaucaauuc

SEQ ID NO: 6690 - RNA, 48 nt, Artificial Sequence
  Description of Artificial Sequence:  Enzymatic Nucleic Acid
gaaggcagggaggaaacucccuucaaggacaucguccgggcgcaucaa

SEQ ID NO: 6691 - RNA, 48 nt, Artificial Sequence
  Description of Artificial Sequence:  Enzymatic Nucleic Acid
agugaaggggaggaaacucccuucaaggacaucguccgggagccgcau

SEQ ID NO: 6692 - RNA, 48 nt, Artificial Sequence
  Description of Artificial Sequence:  Enzymatic Nucleic Acid
gggccaggggaggaaacucccuucaaggacaucguccgggcagugaag

SEQ ID NO: 6693 - RNA, 48 nt, Artificial Sequence
  Description of Artificial Sequence:  Enzymatic Nucleic Acid
caggagggggaggaaacucccuucaaggacaucguccgggcaggccag

SEQ ID NO: 6694 - RNA, 48 nt, Artificial Sequence
  Description of Artificial Sequence:  Enzymatic Nucleic Acid
uccagcugggaggaaacucccuucaaggacaucguccggguccaggag

SEQ ID NO: 6695 - RNA, 48 nt, Artificial Sequence
  Description of Artificial Sequence:  Enzymatic Nucleic Acid
agguccagggaggaaacucccuucaaggacaucguccgggugcuccag

SEQ ID NO: 6696 - RNA, 48 nt, Artificial Sequence
  Description of Artificial Sequence:  Enzymatic Nucleic Acid
cauuaucgggaggaaacucccuucaaggacaucguccgggugaggucc

SEQ ID NO: 6697 - RNA, 48 nt, Artificial Sequence
  Description of Artificial Sequence:  Enzymatic Nucleic Acid
gagcugugggaggaaacucccuucaaggacaucguccgggauuaucgc

SEQ ID NO: 6698 - RNA, 48 nt, Artificial Sequence
  Description of Artificial Sequence:  Enzymatic Nucleic Acid
gaccggagggaggaaacucccuucaaggacaucguccgggugugcauu

SEQ ID NO: 6699 - RNA, 48 nt, Artificial Sequence
  Description of Artificial Sequence:  Enzymatic Nucleic Acid
uccacagaggaggaaacucccuucaaggacaucguccgggcggagcug

SEQ ID NO: 6700 - RNA, 48 nt, Artificial Sequence
  Description of Artificial Sequence:  Enzymatic Nucleic Acid
aggguccaggaggaaacucccuucaaggacaucguccgggagaccgga

SEQ ID NO: 6701 - RNA, 48 nt, Artificial Sequence
  Description of Artificial Sequence:  Enzymatic Nucleic Acid
gaauguggggaggaaacucccuucaaggacaucguccgggagggucca

SEQ ID NO: 6702 - RNA, 48 nt, Artificial Sequence
  Description of Artificial Sequence:  Enzymatic Nucleic Acid
ggcccaggggaggaaacucccuucaaggacaucguccgggcguggaau

SEQ ID NO: 6703 - RNA, 48 nt, Artificial Sequence
  Description of Artificial Sequence:  Enzymatic Nucleic Acid
guaggcggggaggaaacucccuucaaggacaucguccgggccaggccg

SEQ ID NO: 6704 - RNA, 48 nt, Artificial Sequence
  Description of Artificial Sequence:  Enzymatic Nucleic Acid
uguguaggggaggaaacucccuucaaggacaucguccgggggcccagg

SEQ ID NO: 6705 - RNA, 48 nt, Artificial Sequence
  Description of Artificial Sequence:  Enzymatic Nucleic Acid
aggugcagggaggaaacucccuucaaggacaucguccgggguguguag

SEQ ID NO: 6706 - RNA, 48 nt, Artificial Sequence
  Description of Artificial Sequence:  Enzymatic Nucleic Acid
uccaggugggaggaaacucccuucaaggacaucguccgggagcgugug

SEQ ID NO: 6707 - RNA, 48 nt, Artificial Sequence
  Description of Artificial Sequence:  Enzymatic Nucleic Acid
ggccgcagggaggaaacucccuucaaggacaucguccggggguccagg

SEQ ID NO: 6708 - RNA, 48 nt, Artificial Sequence
  Description of Artificial Sequence:  Enzymatic Nucleic Acid
gcaggccgggaggaaacucccuucaaggacaucguccgggagcggucc

SEQ ID NO: 6709 - RNA, 48 nt, Artificial Sequence
  Description of Artificial Sequence:  Enzymatic Nucleic Acid
ccugcaggggaggaaacucccuucaaggacaucguccgggcgcagcgg

SEQ ID NO: 6710 - RNA, 48 nt, Artificial Sequence
  Description of Artificial Sequence:  Enzymatic Nucleic Acid
agcuccugggaggaaacucccuucaaggacaucguccgggaggccgca

SEQ ID NO: 6711 - RNA, 48 nt, Artificial Sequence
  Description of Artificial Sequence:  Enzymatic Nucleic Acid
gggcccagggaggaaacucccuucaaggacaucguccggguccugcag

SEQ ID NO: 6712 - RNA, 48 nt, Artificial Sequence
  Description of Artificial Sequence:  Enzymatic Nucleic Acid
gccccgggggaggaaacucccuucaaggacaucguccgggccagcucc

SEQ ID NO: 6713 - RNA, 48 nt, Artificial Sequence
  Description of Artificial Sequence:  Enzymatic Nucleic Acid
cggaacagggaggaaacucccuucaaggacaucguccgggcccgggcc

SEQ ID NO: 6714 - RNA, 48 nt, Artificial Sequence
  Description of Artificial Sequence:  Enzymatic Nucleic Acid
ccgcggaaggaggaaacucccuucaaggacaucguccgggagccccgg

SEQ ID NO: 6715 - RNA, 48 nt, Artificial Sequence
  Description of Artificial Sequence:  Enzymatic Nucleic Acid
ccaggccgggaggaaacucccuucaaggacaucguccgggggaacagc

SEQ ID NO: 6716 - RNA, 48 nt, Artificial Sequence
  Description of Artificial Sequence:  Enzymatic Nucleic Acid
cagccaggggaggaaacucccuucaaggacaucguccgggcgcggaac

SEQ ID NO: 6717 - RNA, 48 nt, Artificial Sequence
  Description of Artificial Sequence:  Enzymatic Nucleic Acid
cagggcagggaggaaacucccuucaaggacaucguccgggcaggccgc

SEQ ID NO: 6718 - RNA, 48 nt, Artificial Sequence
  Description of Artificial Sequence:  Enzymatic Nucleic Acid
cugcagggggaggaaacucccuucaaggacaucguccgggagccaggc

SEQ ID NO: 6719 - RNA, 48 nt, Artificial Sequence
  Description of Artificial Sequence:  Enzymatic Nucleic Acid
agguacugggaggaaacucccuucaaggacaucguccgggagggcagc

SEQ ID NO: 6720 - RNA, 48 nt, Artificial Sequence
  Description of Artificial Sequence:  Enzymatic Nucleic Acid
uagagguaggaggaaacucccuucaaggacaucguccgggugcagggc

SEQ ID NO: 6721 - RNA, 48 nt, Artificial Sequence
  Description of Artificial Sequence:  Enzymatic Nucleic Acid
uuguccugggaggaaacucccuucaaggacaucguccgggagguagag

SEQ ID NO: 6722 - RNA, 48 nt, Artificial Sequence
  Description of Artificial Sequence:  Enzymatic Nucleic Acid
cugcagcgggaggaaacucccuucaaggacaucguccgggguuguccu

SEQ ID NO: 6723 - RNA, 48 nt, Artificial Sequence
  Description of Artificial Sequence:  Enzymatic Nucleic Acid
gccugcagggaggaaacucccuucaaggacaucguccggggcguuguc

SEQ ID NO: 6724 - RNA, 48 nt, Artificial Sequence
  Description of Artificial Sequence:  Enzymatic Nucleic Acid
agugccugggaggaaacucccuucaaggacaucguccgggagcgcguu

SEQ ID NO: 6725 - RNA, 48 nt, Artificial Sequence
  Description of Artificial Sequence:  Enzymatic Nucleic Acid
aggcagugggaggaaacucccuucaaggacaucguccgggcugcagcg

SEQ ID NO: 6726 - RNA, 48 nt, Artificial Sequence
  Description of Artificial Sequence:  Enzymatic Nucleic Acid
ucaucaggggaggaaacucccuucaaggacaucguccgggagugccug

SEQ ID NO: 6727 - RNA, 48 nt, Artificial Sequence
  Description of Artificial Sequence:  Enzymatic Nucleic Acid
ccaggucgggaggaaacucccuucaaggacaucguccgggggaaggug

SEQ ID NO: 6728 - RNA, 48 nt, Artificial Sequence
  Description of Artificial Sequence:  Enzymatic Nucleic Acid
ugagguugggaggaaacucccuucaaggacaucguccgggccaggucg

SEQ ID NO: 6729 - RNA, 48 nt, Artificial Sequence
  Description of Artificial Sequence:  Enzymatic Nucleic Acid
uugccgugggaggaaacucccuucaaggacaucguccgggaggaagag

SEQ ID NO: 6730 - RNA, 48 nt, Artificial Sequence
  Description of Artificial Sequence:  Enzymatic Nucleic Acid
uggagaugggaggaaacucccuucaaggacaucguccggggguugccg

SEQ ID NO: 6731 - RNA, 48 nt, Artificial Sequence
  Description of Artificial Sequence:  Enzymatic Nucleic Acid
cgggcacgggaggaaacucccuucaaggacaucguccggguggagaug

SEQ ID NO: 6732 - RNA, 48 nt, Artificial Sequence
  Description of Artificial Sequence:  Enzymatic Nucleic Acid
cucgggcaggaggaaacucccuucaaggacaucguccggggcuggaga

SEQ ID NO: 6733 - RNA, 48 nt, Artificial Sequence
  Description of Artificial Sequence:  Enzymatic Nucleic Acid
cgcucgggggaggaaacucccuucaaggacaucguccgggacgcugga

SEQ ID NO: 6734 - RNA, 48 nt, Artificial Sequence
  Description of Artificial Sequence:  Enzymatic Nucleic Acid
aaggcgcgggaggaaacucccuucaaggacaucguccgggucgggcac

SEQ ID NO: 6735 - RNA, 48 nt, Artificial Sequence
  Description of Artificial Sequence:  Enzymatic Nucleic Acid
ggaaggcgggaggaaacucccuucaaggacaucguccggggcucgggc

SEQ ID NO: 6736 - RNA, 48 nt, Artificial Sequence
  Description of Artificial Sequence:  Enzymatic Nucleic Acid
acggaaggggaggaaacucccuucaaggacaucguccggggcgcucgg

SEQ ID NO: 6737 - RNA, 48 nt, Artificial Sequence
  Description of Artificial Sequence:  Enzymatic Nucleic Acid
gcagcccaggaggaaacucccuucaaggacaucguccgggggaaggcg

SEQ ID NO: 6738 - RNA, 48 nt, Artificial Sequence
  Description of Artificial Sequence:  Enzymatic Nucleic Acid
cugugcagggaggaaacucccuucaaggacaucguccgggccacggaa

SEQ ID NO: 6739 - RNA, 48 nt, Artificial Sequence
  Description of Artificial Sequence:  Enzymatic Nucleic Acid
aggcugugggaggaaacucccuucaaggacaucguccgggagcccacg

SEQ ID NO: 6740 - RNA, 48 nt, Artificial Sequence
  Description of Artificial Sequence:  Enzymatic Nucleic Acid
ggucgaggggaggaaacucccuucaaggacaucguccgggugugcagc

SEQ ID NO: 6741 - RNA, 48 nt, Artificial Sequence
  Description of Artificial Sequence:  Enzymatic Nucleic Acid
guaggagaggaggaaacucccuucaaggacaucguccgggggucgagg

SEQ ID NO: 6742 - RNA, 48 nt, Artificial Sequence
  Description of Artificial Sequence:  Enzymatic Nucleic Acid
uucuggugggaggaaacucccuucaaggacaucguccgggaguaggag

SEQ ID NO: 6743 - RNA, 48 nt, Artificial Sequence
  Description of Artificial Sequence:  Enzymatic Nucleic Acid
gggccacgggaggaaacucccuucaaggacaucguccggggguucugg

SEQ ID NO: 6744 - RNA, 48 nt, Artificial Sequence
  Description of Artificial Sequence:  Enzymatic Nucleic Acid
augggccaggaggaaacucccuucaaggacaucguccggggcgguucu

SEQ ID NO: 6745 - RNA, 48 nt, Artificial Sequence
  Description of Artificial Sequence:  Enzymatic Nucleic Acid
cacaugggggaggaaacucccuucaaggacaucguccgggcacgcggu

SEQ ID NO: 6746 - RNA, 48 nt, Artificial Sequence
  Description of Artificial Sequence:  Enzymatic Nucleic Acid
cgggugcaggaggaaacucccuucaaggacaucguccgggaugggcca

SEQ ID NO: 6747 - RNA, 48 nt, Artificial Sequence
  Description of Artificial Sequence:  Enzymatic Nucleic Acid
ugcgggugggaggaaacucccuucaaggacaucguccgggacaugggc

SEQ ID NO: 6748 - RNA, 48 nt, Artificial Sequence
  Description of Artificial Sequence:  Enzymatic Nucleic Acid
aaggcaugggaggaaacucccuucaaggacaucguccggggggugcac

SEQ ID NO: 6749 - RNA, 48 nt, Artificial Sequence
  Description of Artificial Sequence:  Enzymatic Nucleic Acid
acggaaggggaggaaacucccuucaaggacaucguccgggaugcgggu

SEQ ID NO: 6750 - RNA, 48 nt, Artificial Sequence
  Description of Artificial Sequence:  Enzymatic Nucleic Acid
caaggucaggaggaaacucccuucaaggacaucguccgggggaaggca

SEQ ID NO: 6751 - RNA, 48 nt, Artificial Sequence
  Description of Artificial Sequence:  Enzymatic Nucleic Acid
ugaggcggggaggaaacucccuucaaggacaucguccgggcaagguca

SEQ ID NO: 6752 - RNA, 48 nt, Artificial Sequence
  Description of Artificial Sequence:  Enzymatic Nucleic Acid
ucaugaggggaggaaacucccuucaaggacaucguccgggggccaagg

SEQ ID NO: 6753 - RNA, 48 nt, Artificial Sequence
  Description of Artificial Sequence:  Enzymatic Nucleic Acid
uuggcaaaggaggaaacucccuucaaggacaucguccgggagauagag

SEQ ID NO: 6754 - RNA, 48 nt, Artificial Sequence
  Description of Artificial Sequence:  Enzymatic Nucleic Acid
auuguuggggaggaaacucccuucaaggacaucguccgggaaacagau

SEQ ID NO: 6755 - RNA, 48 nt, Artificial Sequence
  Description of Artificial Sequence:  Enzymatic Nucleic Acid
gggcagcgggaggaaacucccuucaaggacaucguccgggugauagau

SEQ ID NO: 6756 - RNA, 48 nt, Artificial Sequence
  Description of Artificial Sequence:  Enzymatic Nucleic Acid
gugggcagggaggaaacucccuucaaggacaucguccggggcugauag

SEQ ID NO: 6757 - RNA, 48 nt, Artificial Sequence
  Description of Artificial Sequence:  Enzymatic Nucleic Acid
ucagugggggaggaaacucccuucaaggacaucguccgggagcgcuga

SEQ ID NO: 6758 - RNA, 48 nt, Artificial Sequence
  Description of Artificial Sequence:  Enzymatic Nucleic Acid
ggccagggggaggaaacucccuucaaggacaucguccgggcucagugg

SEQ ID NO: 6759 - RNA, 48 nt, Artificial Sequence
  Description of Artificial Sequence:  Enzymatic Nucleic Acid
caggggggggaggaaacucccuucaaggacaucguccgggcagggccu

SEQ ID NO: 6760 - RNA, 48 nt, Artificial Sequence
  Description of Artificial Sequence:  Enzymatic Nucleic Acid
agggcacgggaggaaacucccuucaaggacaucguccgggaggggggc

SEQ ID NO: 6761 - RNA, 48 nt, Artificial Sequence
  Description of Artificial Sequence:  Enzymatic Nucleic Acid
gcagggcaggaggaaacucccuucaaggacaucguccggggcaggggg

SEQ ID NO: 6762 - RNA, 48 nt, Artificial Sequence
  Description of Artificial Sequence:  Enzymatic Nucleic Acid
cugcagggggaggaaacucccuucaaggacaucguccgggacgcaggg

SEQ ID NO: 6763 - RNA, 48 nt, Artificial Sequence
  Description of Artificial Sequence:  Enzymatic Nucleic Acid
agguacugggaggaaacucccuucaaggacaucguccgggagggcacg

SEQ ID NO: 6764 - RNA, 48 nt, Artificial Sequence
  Description of Artificial Sequence:  Enzymatic Nucleic Acid
cucagguaggaggaaacucccuucaaggacaucguccgggugcagggc

SEQ ID NO: 6765 - RNA, 48 nt, Artificial Sequence
  Description of Artificial Sequence:  Enzymatic Nucleic Acid
ucguugagggaggaaacucccuucaaggacaucguccgggcucaggua

SEQ ID NO: 6766 - RNA, 48 nt, Artificial Sequence
  Description of Artificial Sequence:  Enzymatic Nucleic Acid
gucacacaggaggaaacucccuucaaggacaucguccgggccaggggu

SEQ ID NO: 6767 - RNA, 48 nt, Artificial Sequence
  Description of Artificial Sequence:  Enzymatic Nucleic Acid
cagucacaggaggaaacucccuucaaggacaucguccgggacccaggg

SEQ ID NO: 6768 - RNA, 48 nt, Artificial Sequence
  Description of Artificial Sequence:  Enzymatic Nucleic Acid
ggcagucaggaggaaacucccuucaaggacaucguccgggacacccag

SEQ ID NO: 6769 - RNA, 48 nt, Artificial Sequence
  Description of Artificial Sequence:  Enzymatic Nucleic Acid
gugcccggggaggaaacucccuucaaggacaucguccgggagucacac

SEQ ID NO: 6770 - RNA, 48 nt, Artificial Sequence
  Description of Artificial Sequence:  Enzymatic Nucleic Acid
ugggcgugggaggaaacucccuucaaggacaucguccgggccggcagu

SEQ ID NO: 6771 - RNA, 48 nt, Artificial Sequence
  Description of Artificial Sequence:  Enzymatic Nucleic Acid
agagugggggaggaaacucccuucaaggacaucguccggggugcccgg

SEQ ID NO: 6772 - RNA, 48 nt, Artificial Sequence
  Description of Artificial Sequence:  Enzymatic Nucleic Acid
cagccaggggaggaaacucccuucaaggacaucguccgggccagagug

SEQ ID NO: 6773 - RNA, 48 nt, Artificial Sequence
  Description of Artificial Sequence:  Enzymatic Nucleic Acid
uucugcagggaggaaacucccuucaaggacaucguccgggcaggccca

SEQ ID NO: 6774 - RNA, 48 nt, Artificial Sequence
  Description of Artificial Sequence:  Enzymatic Nucleic Acid
aacuucugggaggaaacucccuucaaggacaucguccgggagccaggc

SEQ ID NO: 6775 - RNA, 48 nt, Artificial Sequence
  Description of Artificial Sequence:  Enzymatic Nucleic Acid
ccgcggaaggaggaaacucccuucaaggacaucguccggguucugcag

SEQ ID NO: 6776 - RNA, 48 nt, Artificial Sequence
  Description of Artificial Sequence:  Enzymatic Nucleic Acid
aggagccgggaggaaacucccuucaaggacaucguccgggggaacuuc

SEQ ID NO: 6777 - RNA, 48 nt, Artificial Sequence
  Description of Artificial Sequence:  Enzymatic Nucleic Acid
aggaggagggaggaaacucccuucaaggacaucguccgggcgcggaac

SEQ ID NO: 6778 - RNA, 48 nt, Artificial Sequence
  Description of Artificial Sequence:  Enzymatic Nucleic Acid
gcagggcaggaggaaacucccuucaaggacaucguccgggcucggagg

SEQ ID NO: 6779 - RNA, 48 nt, Artificial Sequence
  Description of Artificial Sequence:  Enzymatic Nucleic Acid
cugcagggggaggaaacucccuucaaggacaucguccgggaccucgga

SEQ ID NO: 6780 - RNA, 48 nt, Artificial Sequence
  Description of Artificial Sequence:  Enzymatic Nucleic Acid
ggaggcugggaggaaacucccuucaaggacaucguccgggagggcacc

SEQ ID NO: 6781 - RNA, 48 nt, Artificial Sequence
  Description of Artificial Sequence:  Enzymatic Nucleic Acid
gcgggaggggaggaaacucccuucaaggacaucguccgggugcagggc

SEQ ID NO: 6782 - RNA, 48 nt, Artificial Sequence
  Description of Artificial Sequence:  Enzymatic Nucleic Acid
aggcguugggaggaaacucccuucaaggacaucguccggggggaggcu

SEQ ID NO: 6783 - RNA, 48 nt, Artificial Sequence
  Description of Artificial Sequence:  Enzymatic Nucleic Acid
cagccaggggaggaaacucccuucaaggacaucguccgggguugcggg

SEQ ID NO: 6784 - RNA, 48 nt, Artificial Sequence
  Description of Artificial Sequence:  Enzymatic Nucleic Acid
acggccagggaggaaacucccuucaaggacaucguccgggcaggcguu

SEQ ID NO: 6785 - RNA, 48 nt, Artificial Sequence
  Description of Artificial Sequence:  Enzymatic Nucleic Acid
ggucacggggaggaaacucccuucaaggacaucguccgggcagccagg

SEQ ID NO: 6786 - RNA, 48 nt, Artificial Sequence
  Description of Artificial Sequence:  Enzymatic Nucleic Acid
ugaggucaggaggaaacucccuucaaggacaucguccgggggccagcc

SEQ ID NO: 6787 - RNA, 48 nt, Artificial Sequence
  Description of Artificial Sequence:  Enzymatic Nucleic Acid
cagcuaggggaggaaacucccuucaaggacaucguccgggguuugagg

SEQ ID NO: 6788 - RNA, 48 nt, Artificial Sequence
  Description of Artificial Sequence:  Enzymatic Nucleic Acid
auuggcagggaggaaacucccuucaaggacaucguccggguaggcguu

SEQ ID NO: 6789 - RNA, 48 nt, Artificial Sequence
  Description of Artificial Sequence:  Enzymatic Nucleic Acid
gucauuggggaggaaacucccuucaaggacaucguccgggagcuaggc

SEQ ID NO: 6790 - RNA, 48 nt, Artificial Sequence
  Description of Artificial Sequence:  Enzymatic Nucleic Acid
cagcccugggaggaaacucccuucaaggacaucguccgggaggucauu

SEQ ID NO: 6791 - RNA, 48 nt, Artificial Sequence
  Description of Artificial Sequence:  Enzymatic Nucleic Acid
cagcgcagggaggaaacucccuucaaggacaucguccgggccugcagg

SEQ ID NO: 6792 - RNA, 48 nt, Artificial Sequence
  Description of Artificial Sequence:  Enzymatic Nucleic Acid
ccacagcgggaggaaacucccuucaaggacaucguccgggagcccugc

SEQ ID NO: 6793 - RNA, 48 nt, Artificial Sequence
  Description of Artificial Sequence:  Enzymatic Nucleic Acid
ggccacagggaggaaacucccuucaaggacaucguccggggcagcccu

SEQ ID NO: 6794 - RNA, 48 nt, Artificial Sequence
  Description of Artificial Sequence:  Enzymatic Nucleic Acid
gguggccaggaggaaacucccuucaaggacaucguccgggagcgcagc

SEQ ID NO: 6795 - RNA, 48 nt, Artificial Sequence
  Description of Artificial Sequence:  Enzymatic Nucleic Acid
gccgguggggaggaaacucccuucaaggacaucguccgggcacagcgc

SEQ ID NO: 6796 - RNA, 48 nt, Artificial Sequence
  Description of Artificial Sequence:  Enzymatic Nucleic Acid
gguaagggggaggaaacucccuucaaggacaucguccgggcgguggcc

SEQ ID NO: 6797 - RNA, 48 nt, Artificial Sequence
  Description of Artificial Sequence:  Enzymatic Nucleic Acid
uggcccugggaggaaacucccuucaaggacaucguccgggcgguccag

SEQ ID NO: 6798 - RNA, 48 nt, Artificial Sequence
  Description of Artificial Sequence:  Enzymatic Nucleic Acid
aucgguggggaggaaacucccuucaaggacaucguccgggccugccgg

SEQ ID NO: 6799 - RNA, 48 nt, Artificial Sequence
  Description of Artificial Sequence:  Enzymatic Nucleic Acid
cccagcggggaggaaacucccuucaaggacaucguccggguccucauc

SEQ ID NO: 6800 - RNA, 48 nt, Artificial Sequence
  Description of Artificial Sequence:  Enzymatic Nucleic Acid
agccccagggaggaaacucccuucaaggacaucguccgggggcuccuc

SEQ ID NO: 6801 - RNA, 48 nt, Artificial Sequence
  Description of Artificial Sequence:  Enzymatic Nucleic Acid
uugggaagggaggaaacucccuucaaggacaucguccgggcccagcgg

SEQ ID NO: 6802 - RNA, 48 nt, Artificial Sequence
  Description of Artificial Sequence:  Enzymatic Nucleic Acid
uggcagcaggaggaaacucccuucaaggacaucguccggguugggaag

SEQ ID NO: 6803 - RNA, 48 nt, Artificial Sequence
  Description of Artificial Sequence:  Enzymatic Nucleic Acid
gcuggcagggaggaaacucccuucaaggacaucguccgggacuuggga

SEQ ID NO: 6804 - RNA, 48 nt, Artificial Sequence
  Description of Artificial Sequence:  Enzymatic Nucleic Acid
cuggcuggggaggaaacucccuucaaggacaucguccgggagcacuug

SEQ ID NO: 6805 - RNA, 48 nt, Artificial Sequence
  Description of Artificial Sequence:  Enzymatic Nucleic Acid
gcaucuggggaggaaacucccuucaaggacaucguccggguggcagca

SEQ ID NO: 6806 - RNA, 48 nt, Artificial Sequence
  Description of Artificial Sequence:  Enzymatic Nucleic Acid
gucagcggggaggaaacucccuucaaggacaucguccgggaucuggcu

SEQ ID NO: 6807 - RNA, 48 nt, Artificial Sequence
  Description of Artificial Sequence:  Enzymatic Nucleic Acid
cuugucagggaggaaacucccuucaaggacaucguccgggggcaucug

SEQ ID NO: 6808 - RNA, 48 nt, Artificial Sequence
  Description of Artificial Sequence:  Enzymatic Nucleic Acid
uacugaggggaggaaacucccuucaaggacaucguccgggcuugucag

SEQ ID NO: 6809 - RNA, 48 nt, Artificial Sequence
  Description of Artificial Sequence:  Enzymatic Nucleic Acid
cuccaguaggaggaaacucccuucaaggacaucguccgggugaggccu

SEQ ID NO: 6810 - RNA, 48 nt, Artificial Sequence
  Description of Artificial Sequence:  Enzymatic Nucleic Acid
cuuccaggggaggaaacucccuucaaggacaucguccggguccaguac

SEQ ID NO: 6811 - RNA, 48 nt, Artificial Sequence
  Description of Artificial Sequence:  Enzymatic Nucleic Acid
ugccgaagggaggaaacucccuucaaggacaucguccggguggucuuc

SEQ ID NO: 6812 - RNA, 48 nt, Artificial Sequence
  Description of Artificial Sequence:  Enzymatic Nucleic Acid
auugccugggaggaaacucccuucaaggacaucguccgggcgaagcug

SEQ ID NO: 6813 - RNA, 48 nt, Artificial Sequence
  Description of Artificial Sequence:  Enzymatic Nucleic Acid
gcgcauugggaggaaacucccuucaaggacaucguccgggcugccgaa

SEQ ID NO: 6814 - RNA, 48 nt, Artificial Sequence
  Description of Artificial Sequence:  Enzymatic Nucleic Acid
cuucagcgggaggaaacucccuucaaggacaucguccgggauugccug

SEQ ID NO: 6815 - RNA, 48 nt, Artificial Sequence
  Description of Artificial Sequence:  Enzymatic Nucleic Acid
cccuucagggaggaaacucccuucaaggacaucguccggggcauugcc

SEQ ID NO: 6816 - RNA, 48 nt, Artificial Sequence
  Description of Artificial Sequence:  Enzymatic Nucleic Acid
gcggcacgggaggaaacucccuucaaggacaucguccggggucccuuc

SEQ ID NO: 6817 - RNA, 48 nt, Artificial Sequence
  Description of Artificial Sequence:  Enzymatic Nucleic Acid
gggcggcaggaggaaacucccuucaaggacaucguccggggcgucccu

SEQ ID NO: 6818 - RNA, 48 nt, Artificial Sequence
  Description of Artificial Sequence:  Enzymatic Nucleic Acid
ccgggcggggaggaaacucccuucaaggacaucguccgggacgcgucc

SEQ ID NO: 6819 - RNA, 48 nt, Artificial Sequence
  Description of Artificial Sequence:  Enzymatic Nucleic Acid
ucaccgggggaggaaacucccuucaaggacaucguccgggggcacgcg

SEQ ID NO: 6820 - RNA, 48 nt, Artificial Sequence
  Description of Artificial Sequence:  Enzymatic Nucleic Acid
ggcugucaggaggaaacucccuucaaggacaucguccgggcgggcggc

SEQ ID NO: 6821 - RNA, 48 nt, Artificial Sequence
  Description of Artificial Sequence:  Enzymatic Nucleic Acid
ccggcgggggaggaaacucccuucaaggacaucguccgggugucaccg

SEQ ID NO: 6822 - RNA, 48 nt, Artificial Sequence
  Description of Artificial Sequence:  Enzymatic Nucleic Acid
uugcccggggaggaaacucccuucaaggacaucguccggggggcuguc

SEQ ID NO: 6823 - RNA, 48 nt, Artificial Sequence
  Description of Artificial Sequence:  Enzymatic Nucleic Acid
agccguugggaggaaacucccuucaaggacaucguccgggccggcggg

SEQ ID NO: 6824 - RNA, 48 nt, Artificial Sequence
  Description of Artificial Sequence:  Enzymatic Nucleic Acid
ggccagagggaggaaacucccuucaaggacaucguccgggcguugccc

SEQ ID NO: 6825 - RNA, 48 nt, Artificial Sequence
  Description of Artificial Sequence:  Enzymatic Nucleic Acid
gccgugggggaggaaacucccuucaaggacaucguccgggcagagccg

SEQ ID NO: 6826 - RNA, 48 nt, Artificial Sequence
  Description of Artificial Sequence:  Enzymatic Nucleic Acid
uugaugugggaggaaacucccuucaaggacaucguccgggcgugggcc

SEQ ID NO: 6827 - RNA, 48 nt, Artificial Sequence
  Description of Artificial Sequence:  Enzymatic Nucleic Acid
gagccaggggaggaaacucccuucaaggacaucguccgggagaguccc

SEQ ID NO: 6828 - RNA, 48 nt, Artificial Sequence
  Description of Artificial Sequence:  Enzymatic Nucleic Acid
cagcagagggaggaaacucccuucaaggacaucguccgggcaggcaga

SEQ ID NO: 6829 - RNA, 48 nt, Artificial Sequence
  Description of Artificial Sequence:  Enzymatic Nucleic Acid
gggcucagggaggaaacucccuucaaggacaucguccgggagagccag

SEQ ID NO: 6830 - RNA, 48 nt, Artificial Sequence
  Description of Artificial Sequence:  Enzymatic Nucleic Acid
agcgggggggaggaaacucccuucaaggacaucguccgggucagcaga

SEQ ID NO: 6831 - RNA, 48 nt, Artificial Sequence
  Description of Artificial Sequence:  Enzymatic Nucleic Acid
gcagugagggaggaaacucccuucaaggacaucguccggggggggcuc

SEQ ID NO: 6832 - RNA, 48 nt, Artificial Sequence
  Description of Artificial Sequence:  Enzymatic Nucleic Acid
ccgcacugggaggaaacucccuucaaggacaucguccgggagugagcg

SEQ ID NO: 6833 - RNA, 48 nt, Artificial Sequence
  Description of Artificial Sequence:  Enzymatic Nucleic Acid
gggccgcaggaggaaacucccuucaaggacaucguccgggugcaguga

SEQ ID NO: 6834 - RNA, 48 nt, Artificial Sequence
  Description of Artificial Sequence:  Enzymatic Nucleic Acid
ucgggccgggaggaaacucccuucaaggacaucguccgggacugcagu

SEQ ID NO: 6835 - RNA, 48 nt, Artificial Sequence
  Description of Artificial Sequence:  Enzymatic Nucleic Acid
cccucgggggaggaaacucccuucaaggacaucguccgggcgcacugc

SEQ ID NO: 6836 - RNA, 48 nt, Artificial Sequence
  Description of Artificial Sequence:  Enzymatic Nucleic Acid
gcucggagggaggaaacucccuucaaggacaucguccgggccucgggc

SEQ ID NO: 6837 - RNA, 48 nt, Artificial Sequence
  Description of Artificial Sequence:  Enzymatic Nucleic Acid
ccugguggggaggaaacucccuucaaggacaucguccgggucggagcc

SEQ ID NO: 6838 - RNA, 48 nt, Artificial Sequence
  Description of Artificial Sequence:  Enzymatic Nucleic Acid
guggggaaggaggaaacucccuucaaggacaucguccgggccuggugg

SEQ ID NO: 6839 - RNA, 48 nt, Artificial Sequence
  Description of Artificial Sequence:  Enzymatic Nucleic Acid
ggcgagggggaggaaacucccuucaaggacaucguccgggccgaggug

SEQ ID NO: 6840 - RNA, 48 nt, Artificial Sequence
  Description of Artificial Sequence:  Enzymatic Nucleic Acid
gccuccggggaggaaacucccuucaaggacaucguccggggagggccc

SEQ ID NO: 6841 - RNA, 48 nt, Artificial Sequence
  Description of Artificial Sequence:  Enzymatic Nucleic Acid
cagccuggggaggaaacucccuucaaggacaucguccgggcuccggcg

SEQ ID NO: 6842 - RNA, 48 nt, Artificial Sequence
  Description of Artificial Sequence:  Enzymatic Nucleic Acid
gugaacagggaggaaacucccuucaaggacaucguccgggcuggccuc

SEQ ID NO: 6843 - RNA, 48 nt, Artificial Sequence
  Description of Artificial Sequence:  Enzymatic Nucleic Acid
ugcgugaaggaggaaacucccuucaaggacaucguccgggagccuggc

SEQ ID NO: 6844 - RNA, 48 nt, Artificial Sequence
  Description of Artificial Sequence:  Enzymatic Nucleic Acid
gguucuugggaggaaacucccuucaaggacaucguccggggugaacag

SEQ ID NO: 6845 - RNA, 48 nt, Artificial Sequence
  Description of Artificial Sequence:  Enzymatic Nucleic Acid
ugcgggugggaggaaacucccuucaaggacaucguccggggguucuug

SEQ ID NO: 6846 - RNA, 48 nt, Artificial Sequence
  Description of Artificial Sequence:  Enzymatic Nucleic Acid
aguggcugggaggaaacucccuucaaggacaucguccggggggugcgg

SEQ ID NO: 6847 - RNA, 48 nt, Artificial Sequence
  Description of Artificial Sequence:  Enzymatic Nucleic Acid
ggcaguggggaggaaacucccuucaaggacaucguccgggugcgggug

SEQ ID NO: 6848 - RNA, 48 nt, Artificial Sequence
  Description of Artificial Sequence:  Enzymatic Nucleic Acid
ccagacggggaggaaacucccuucaaggacaucguccgggaguggcug

SEQ ID NO: 6849 - RNA, 48 nt, Artificial Sequence
  Description of Artificial Sequence:  Enzymatic Nucleic Acid
ggcccagaggaggaaacucccuucaaggacaucguccgggggcagugg

SEQ ID NO: 6850 - RNA, 48 nt, Artificial Sequence
  Description of Artificial Sequence:  Enzymatic Nucleic Acid
cugccuggggaggaaacucccuucaaggacaucguccgggccagacgg

SEQ ID NO: 6851 - RNA, 48 nt, Artificial Sequence
  Description of Artificial Sequence:  Enzymatic Nucleic Acid
gcugccugggaggaaacucccuucaaggacaucguccgggcuggccca

SEQ ID NO: 6852 - RNA, 48 nt, Artificial Sequence
  Description of Artificial Sequence:  Enzymatic Nucleic Acid
ccccgcugggaggaaacucccuucaaggacaucguccgggcugccugg

SEQ ID NO: 6853 - RNA, 48 nt, Artificial Sequence
  Description of Artificial Sequence:  Enzymatic Nucleic Acid
cacccccgggaggaaacucccuucaaggacaucguccgggugccugcc

SEQ ID NO: 6854 - RNA, 48 nt, Artificial Sequence
  Description of Artificial Sequence:  Enzymatic Nucleic Acid
ucccgccaggaggaaacucccuucaaggacaucguccgggccccgcug

SEQ ID NO: 6855 - RNA, 48 nt, Artificial Sequence
  Description of Artificial Sequence:  Enzymatic Nucleic Acid
cagucccgggaggaaacucccuucaaggacaucguccgggcacccccg

SEQ ID NO: 6856 - RNA, 48 nt, Artificial Sequence
  Description of Artificial Sequence:  Enzymatic Nucleic Acid
cugagucaggaggaaacucccuucaaggacaucguccgggcagucccg

SEQ ID NO: 6857 - RNA, 48 nt, Artificial Sequence
  Description of Artificial Sequence:  Enzymatic Nucleic Acid
caccugagggaggaaacucccuucaaggacaucguccgggcuucugag

SEQ ID NO: 6858 - RNA, 48 nt, Artificial Sequence
  Description of Artificial Sequence:  Enzymatic Nucleic Acid
guagggcaggaggaaacucccuucaaggacaucguccgggcugagccu

SEQ ID NO: 6859 - RNA, 48 nt, Artificial Sequence
  Description of Artificial Sequence:  Enzymatic Nucleic Acid
ggguagggggaggaaacucccuucaaggacaucguccgggaccugagc

SEQ ID NO: 6860 - RNA, 48 nt, Artificial Sequence
  Description of Artificial Sequence:  Enzymatic Nucleic Acid
aggugaggggaggaaacucccuucaaggacaucguccggguggguagg

SEQ ID NO: 6861 - RNA, 48 nt, Artificial Sequence
  Description of Artificial Sequence:  Enzymatic Nucleic Acid
ugaggcugggaggaaacucccuucaaggacaucguccgggaggugagg

SEQ ID NO: 6862 - RNA, 48 nt, Artificial Sequence
  Description of Artificial Sequence:  Enzymatic Nucleic Acid
gggugaggggaggaaacucccuucaaggacaucguccgggugcaggug

SEQ ID NO: 6863 - RNA, 48 nt, Artificial Sequence
  Description of Artificial Sequence:  Enzymatic Nucleic Acid
gcgccaggggaggaaacucccuucaaggacaucguccgggccaggggg

SEQ ID NO: 6864 - RNA, 48 nt, Artificial Sequence
  Description of Artificial Sequence:  Enzymatic Nucleic Acid
caccagcgggaggaaacucccuucaaggacaucguccgggcaggccca

SEQ ID NO: 6865 - RNA, 48 nt, Artificial Sequence
  Description of Artificial Sequence:  Enzymatic Nucleic Acid
agcaccagggaggaaacucccuucaaggacaucguccggggccaggcc

SEQ ID NO: 6866 - RNA, 48 nt, Artificial Sequence
  Description of Artificial Sequence:  Enzymatic Nucleic Acid
ccacagcaggaggaaacucccuucaaggacaucguccgggcagcgcca

SEQ ID NO: 6867 - RNA, 48 nt, Artificial Sequence
  Description of Artificial Sequence:  Enzymatic Nucleic Acid
guccacagggaggaaacucccuucaaggacaucguccgggaccagcgc

SEQ ID NO: 6868 - RNA, 48 nt, Artificial Sequence
  Description of Artificial Sequence:  Enzymatic Nucleic Acid
acuguccaggaggaaacucccuucaaggacaucguccgggagcaccag

SEQ ID NO: 6869 - RNA, 48 nt, Artificial Sequence
  Description of Artificial Sequence:  Enzymatic Nucleic Acid
cccaagcaggaggaaacucccuucaaggacaucguccggguguccaca

SEQ ID NO: 6870 - RNA, 48 nt, Artificial Sequence
  Description of Artificial Sequence:  Enzymatic Nucleic Acid
ggcccaagggaggaaacucccuucaaggacaucguccgggacugucca

SEQ ID NO: 6871 - RNA, 48 nt, Artificial Sequence
  Description of Artificial Sequence:  Enzymatic Nucleic Acid
cagcagggggaggaaacucccuucaaggacaucguccgggccaagcac

SEQ ID NO: 6872 - RNA, 48 nt, Artificial Sequence
  Description of Artificial Sequence:  Enzymatic Nucleic Acid
ggggucagggaggaaacucccuucaaggacaucguccgggagggccca

SEQ ID NO: 6873 - RNA, 48 nt, Artificial Sequence
  Description of Artificial Sequence:  Enzymatic Nucleic Acid
cucuucauggaggaaacucccuucaaggacaucguccgggguaggggu

SEQ ID NO: 6874 - RNA, 48 nt, Artificial Sequence
  Description of Artificial Sequence:  Enzymatic Nucleic Acid
gcccucuuggaggaaacucccuucaaggacaucguccgggaucguagg

SEQ ID NO: 6875 - RNA, 48 nt, Artificial Sequence
  Description of Artificial Sequence:  Enzymatic Nucleic Acid
gacgcccuggaggaaacucccuucaaggacaucguccggguucaucgu

SEQ ID NO: 6876 - RNA, 48 nt, Artificial Sequence
  Description of Artificial Sequence:  Enzymatic Nucleic Acid
cggacgccggaggaaacucccuucaaggacaucguccgggucuucauc

SEQ ID NO: 6877 - RNA, 48 nt, Artificial Sequence
  Description of Artificial Sequence:  Enzymatic Nucleic Acid
gcggacgcggaggaaacucccuucaaggacaucguccgggcucuucau

SEQ ID NO: 6878 - RNA, 48 nt, Artificial Sequence
  Description of Artificial Sequence:  Enzymatic Nucleic Acid
gcucccucggaggaaacucccuucaaggacaucguccgggagcggacg

SEQ ID NO: 6879 - RNA, 48 nt, Artificial Sequence
  Description of Artificial Sequence:  Enzymatic Nucleic Acid
ggcucccuggaggaaacucccuucaaggacaucguccgggcagcggac

SEQ ID NO: 6880 - RNA, 48 nt, Artificial Sequence
  Description of Artificial Sequence:  Enzymatic Nucleic Acid
ccggcuccggaggaaacucccuucaaggacaucguccggguccagcgg

SEQ ID NO: 6881 - RNA, 48 nt, Artificial Sequence
  Description of Artificial Sequence:  Enzymatic Nucleic Acid
gccggcucggaggaaacucccuucaaggacaucguccgggcuccagcg

SEQ ID NO: 6882 - RNA, 48 nt, Artificial Sequence
  Description of Artificial Sequence:  Enzymatic Nucleic Acid
agccggcuggaggaaacucccuucaaggacaucguccgggccuccagc

SEQ ID NO: 6883 - RNA, 48 nt, Artificial Sequence
  Description of Artificial Sequence:  Enzymatic Nucleic Acid
ccagcagcggaggaaacucccuucaaggacaucguccgggggcucccu

SEQ ID NO: 6884 - RNA, 48 nt, Artificial Sequence
  Description of Artificial Sequence:  Enzymatic Nucleic Acid
acccaugcggaggaaacucccuucaaggacaucguccgggagcagccg

SEQ ID NO: 6885 - RNA, 48 nt, Artificial Sequence
  Description of Artificial Sequence:  Enzymatic Nucleic Acid
acagcaccggaggaaacucccuucaaggacaucguccgggaugccagc

SEQ ID NO: 6886 - RNA, 48 nt, Artificial Sequence
  Description of Artificial Sequence:  Enzymatic Nucleic Acid
cacagcacggaggaaacucccuucaaggacaucguccgggcaugccag

SEQ ID NO: 6887 - RNA, 48 nt, Artificial Sequence
  Description of Artificial Sequence:  Enzymatic Nucleic Acid
ccugcagcggaggaaacucccuucaaggacaucguccgggacagcacc

SEQ ID NO: 6888 - RNA, 48 nt, Artificial Sequence
  Description of Artificial Sequence:  Enzymatic Nucleic Acid
ugccaggcggaggaaacucccuucaaggacaucguccgggugcagcca

SEQ ID NO: 6889 - RNA, 48 nt, Artificial Sequence
  Description of Artificial Sequence:  Enzymatic Nucleic Acid
ccaccugcggaggaaacucccuucaaggacaucguccgggaggccugc

SEQ ID NO: 6890 - RNA, 48 nt, Artificial Sequence
  Description of Artificial Sequence:  Enzymatic Nucleic Acid
gcugccacggaggaaacucccuucaaggacaucguccgggugccaggc

SEQ ID NO: 6891 - RNA, 48 nt, Artificial Sequence
  Description of Artificial Sequence:  Enzymatic Nucleic Acid
ggggcugcggaggaaacucccuucaaggacaucguccgggaccugcca

SEQ ID NO: 6892 - RNA, 48 nt, Artificial Sequence
  Description of Artificial Sequence:  Enzymatic Nucleic Acid
gcaggcacggaggaaacucccuucaaggacaucguccgggugggcaug

SEQ ID NO: 6893 - RNA, 48 nt, Artificial Sequence
  Description of Artificial Sequence:  Enzymatic Nucleic Acid
cuugggcuggaggaaacucccuucaaggacaucguccgggauuguagc

SEQ ID NO: 6894 - RNA, 48 nt, Artificial Sequence
  Description of Artificial Sequence:  Enzymatic Nucleic Acid
gucgucacggaggaaacucccuucaaggacaucguccggguugggcuc

SEQ ID NO: 6895 - RNA, 48 nt, Artificial Sequence
  Description of Artificial Sequence:  Enzymatic Nucleic Acid
cuugucguggaggaaacucccuucaaggacaucguccgggaccuuggg

SEQ ID NO: 6896 - RNA, 48 nt, Artificial Sequence
  Description of Artificial Sequence:  Enzymatic Nucleic Acid
cagcuuguggaggaaacucccuucaaggacaucguccggggucaccuu

SEQ ID NO: 6897 - RNA, 48 nt, Artificial Sequence
  Description of Artificial Sequence:  Enzymatic Nucleic Acid
ugcaggccggaggaaacucccuucaaggacaucguccgggugcugggg

SEQ ID NO: 6898 - RNA, 48 nt, Artificial Sequence
  Description of Artificial Sequence:  Enzymatic Nucleic Acid
cugcaggcggaggaaacucccuucaaggacaucguccgggcugcuggg

SEQ ID NO: 6899 - RNA, 48 nt, Artificial Sequence
  Description of Artificial Sequence:  Enzymatic Nucleic Acid
ggcacagcggaggaaacucccuucaaggacaucguccgggugcaggcc

SEQ ID NO: 6900 - RNA, 48 nt, Artificial Sequence
  Description of Artificial Sequence:  Enzymatic Nucleic Acid
gggaugccggaggaaacucccuucaaggacaucguccgggacgggcac

SEQ ID NO: 6901 - RNA, 48 nt, Artificial Sequence
  Description of Artificial Sequence:  Enzymatic Nucleic Acid
agggaugcggaggaaacucccuucaaggacaucguccgggcacgggca

SEQ ID NO: 6902 - RNA, 48 nt, Artificial Sequence
  Description of Artificial Sequence:  Enzymatic Nucleic Acid
gcgguugcggaggaaacucccuucaaggacaucguccggggugcagga

SEQ ID NO: 6903 - RNA, 48 nt, Artificial Sequence
  Description of Artificial Sequence:  Enzymatic Nucleic Acid
agugcagcggaggaaacucccuucaaggacaucguccgggacaggaug

SEQ ID NO: 6904 - RNA, 48 nt, Artificial Sequence
  Description of Artificial Sequence:  Enzymatic Nucleic Acid
agcacauuggaggaaacucccuucaaggacaucguccggggagugcag

SEQ ID NO: 6905 - RNA, 48 nt, Artificial Sequence
  Description of Artificial Sequence:  Enzymatic Nucleic Acid
auucgggcggaggaaacucccuucaaggacaucguccgggagcacauu

SEQ ID NO: 6906 - RNA, 48 nt, Artificial Sequence
  Description of Artificial Sequence:  Enzymatic Nucleic Acid
caucaauuggaggaaacucccuucaaggacaucguccggggggccagc

SEQ ID NO: 6907 - RNA, 48 nt, Artificial Sequence
  Description of Artificial Sequence:  Enzymatic Nucleic Acid
agccgcauggaggaaacucccuucaaggacaucguccgggaauucggg

SEQ ID NO: 6908 - RNA, 48 nt, Artificial Sequence
  Description of Artificial Sequence:  Enzymatic Nucleic Acid
aaggcagcggaggaaacucccuucaaggacaucguccggggcaucaau

SEQ ID NO: 6909 - RNA, 48 nt, Artificial Sequence
  Description of Artificial Sequence:  Enzymatic Nucleic Acid
ggccaggcggaggaaacucccuucaaggacaucguccgggagugaagg

SEQ ID NO: 6910 - RNA, 48 nt, Artificial Sequence
  Description of Artificial Sequence:  Enzymatic Nucleic Acid
aggagggcggaggaaacucccuucaaggacaucguccgggaggccagu

SEQ ID NO: 6911 - RNA, 48 nt, Artificial Sequence
  Description of Artificial Sequence:  Enzymatic Nucleic Acid
agcugcucggaggaaacucccuucaaggacaucguccgggaggagggc

SEQ ID NO: 6912 - RNA, 48 nt, Artificial Sequence
  Description of Artificial Sequence:  Enzymatic Nucleic Acid
cagcugcuggaggaaacucccuucaaggacaucguccgggcaggaggg

SEQ ID NO: 6913 - RNA, 48 nt, Artificial Sequence
  Description of Artificial Sequence:  Enzymatic Nucleic Acid
cugaggucggaggaaacucccuucaaggacaucguccgggagcugcuc

SEQ ID NO: 6914 - RNA, 48 nt, Artificial Sequence
  Description of Artificial Sequence:  Enzymatic Nucleic Acid
gcugagguggaggaaacucccuucaaggacaucguccgggcagcugcu

SEQ ID NO: 6915 - RNA, 48 nt, Artificial Sequence
  Description of Artificial Sequence:  Enzymatic Nucleic Acid
ugcauuauggaggaaacucccuucaaggacaucguccggggcugaggu

SEQ ID NO: 6916 - RNA, 48 nt, Artificial Sequence
  Description of Artificial Sequence:  Enzymatic Nucleic Acid
ccacagacggaggaaacucccuucaaggacaucguccgggggagcugu

SEQ ID NO: 6917 - RNA, 48 nt, Artificial Sequence
  Description of Artificial Sequence:  Enzymatic Nucleic Acid
gcagggucggaggaaacucccuucaaggacaucguccgggacagaccg

SEQ ID NO: 6918 - RNA, 48 nt, Artificial Sequence
  Description of Artificial Sequence:  Enzymatic Nucleic Acid
ggcaggguggaggaaacucccuucaaggacaucguccgggcacagacc

SEQ ID NO: 6919 - RNA, 48 nt, Artificial Sequence
  Description of Artificial Sequence:  Enzymatic Nucleic Acid
gcccaggcggaggaaacucccuucaaggacaucguccgggguggaaug

SEQ ID NO: 6920 - RNA, 48 nt, Artificial Sequence
  Description of Artificial Sequence:  Enzymatic Nucleic Acid
aggcggccggaggaaacucccuucaaggacaucguccgggaggccgug

SEQ ID NO: 6921 - RNA, 48 nt, Artificial Sequence
  Description of Artificial Sequence:  Enzymatic Nucleic Acid
uaggcggcggaggaaacucccuucaaggacaucguccgggcaggccgu

SEQ ID NO: 6922 - RNA, 48 nt, Artificial Sequence
  Description of Artificial Sequence:  Enzymatic Nucleic Acid
cagcggucggaggaaacucccuucaaggacaucguccgggaggugcag

SEQ ID NO: 6923 - RNA, 48 nt, Artificial Sequence
  Description of Artificial Sequence:  Enzymatic Nucleic Acid
gcagcgguggaggaaacucccuucaaggacaucguccgggcaggugca

SEQ ID NO: 6924 - RNA, 48 nt, Artificial Sequence
  Description of Artificial Sequence:  Enzymatic Nucleic Acid
cugcaggcggaggaaacucccuucaaggacaucguccggggcagcggu

SEQ ID NO: 6925 - RNA, 48 nt, Artificial Sequence
  Description of Artificial Sequence:  Enzymatic Nucleic Acid
cccagcucggaggaaacucccuucaaggacaucguccgggugcaggcc

SEQ ID NO: 6926 - RNA, 48 nt, Artificial Sequence
  Description of Artificial Sequence:  Enzymatic Nucleic Acid
gcccagcuggaggaaacucccuucaaggacaucguccgggcugcaggc

SEQ ID NO: 6927 - RNA, 48 nt, Artificial Sequence
  Description of Artificial Sequence:  Enzymatic Nucleic Acid
cccgggccggaggaaacucccuucaaggacaucguccgggagcuccug

SEQ ID NO: 6928 - RNA, 48 nt, Artificial Sequence
  Description of Artificial Sequence:  Enzymatic Nucleic Acid
ccccgggcggaggaaacucccuucaaggacaucguccgggcagcuccu

SEQ ID NO: 6929 - RNA, 48 nt, Artificial Sequence
  Description of Artificial Sequence:  Enzymatic Nucleic Acid
aacagcccggaggaaacucccuucaaggacaucguccggggggcccag

SEQ ID NO: 6930 - RNA, 48 nt, Artificial Sequence
  Description of Artificial Sequence:  Enzymatic Nucleic Acid
gaacagccggaggaaacucccuucaaggacaucguccgggcgggccca

SEQ ID NO: 6931 - RNA, 48 nt, Artificial Sequence
  Description of Artificial Sequence:  Enzymatic Nucleic Acid
ggaacagcggaggaaacucccuucaaggacaucguccgggccgggccc

SEQ ID NO: 6932 - RNA, 48 nt, Artificial Sequence
  Description of Artificial Sequence:  Enzymatic Nucleic Acid
agccaggcggaggaaacucccuucaaggacaucguccggggcggaaca

SEQ ID NO: 6933 - RNA, 48 nt, Artificial Sequence
  Description of Artificial Sequence:  Enzymatic Nucleic Acid
agggcagcggaggaaacucccuucaaggacaucguccgggaggccgcg

SEQ ID NO: 6934 - RNA, 48 nt, Artificial Sequence
  Description of Artificial Sequence:  Enzymatic Nucleic Acid
gcguugucggaggaaacucccuucaaggacaucguccgggugcaggua

SEQ ID NO: 6935 - RNA, 48 nt, Artificial Sequence
  Description of Artificial Sequence:  Enzymatic Nucleic Acid
cgcguuguggaggaaacucccuucaaggacaucguccgggcugcaggu

SEQ ID NO: 6936 - RNA, 48 nt, Artificial Sequence
  Description of Artificial Sequence:  Enzymatic Nucleic Acid
ggcagugcggaggaaacucccuucaaggacaucguccgggugcagcgc

SEQ ID NO: 6937 - RNA, 48 nt, Artificial Sequence
  Description of Artificial Sequence:  Enzymatic Nucleic Acid
ggugucauggaggaaacucccuucaaggacaucguccgggaggcagug

SEQ ID NO: 6938 - RNA, 48 nt, Artificial Sequence
  Description of Artificial Sequence:  Enzymatic Nucleic Acid
gaagguguggaggaaacucccuucaaggacaucguccgggaucaggca

SEQ ID NO: 6939 - RNA, 48 nt, Artificial Sequence
  Description of Artificial Sequence:  Enzymatic Nucleic Acid
gcccagguggaggaaacucccuucaaggacaucguccggggcggaagg

SEQ ID NO: 6940 - RNA, 48 nt, Artificial Sequence
  Description of Artificial Sequence:  Enzymatic Nucleic Acid
agguugccggaggaaacucccuucaaggacaucguccgggaggucgcg

SEQ ID NO: 6941 - RNA, 48 nt, Artificial Sequence
  Description of Artificial Sequence:  Enzymatic Nucleic Acid
gagguugcggaggaaacucccuucaaggacaucguccgggcaggucgc

SEQ ID NO: 6942 - RNA, 48 nt, Artificial Sequence
  Description of Artificial Sequence:  Enzymatic Nucleic Acid
ggcgcgcuggaggaaacucccuucaaggacaucguccggggggcacgc

SEQ ID NO: 6943 - RNA, 48 nt, Artificial Sequence
  Description of Artificial Sequence:  Enzymatic Nucleic Acid
gugcagccggaggaaacucccuucaaggacaucguccgggacggaagg

SEQ ID NO: 6944 - RNA, 48 nt, Artificial Sequence
  Description of Artificial Sequence:  Enzymatic Nucleic Acid
ugugcagcggaggaaacucccuucaaggacaucguccgggcacggaag

SEQ ID NO: 6945 - RNA, 48 nt, Artificial Sequence
  Description of Artificial Sequence:  Enzymatic Nucleic Acid
gagacgguggaggaaacucccuucaaggacaucguccggggaggcugu

SEQ ID NO: 6946 - RNA, 48 nt, Artificial Sequence
  Description of Artificial Sequence:  Enzymatic Nucleic Acid
acgcgguuggaggaaacucccuucaaggacaucguccggguggugcag

SEQ ID NO: 6947 - RNA, 48 nt, Artificial Sequence
  Description of Artificial Sequence:  Enzymatic Nucleic Acid
acaugggcggaggaaacucccuucaaggacaucguccgggacgcgguu

SEQ ID NO: 6948 - RNA, 48 nt, Artificial Sequence
  Description of Artificial Sequence:  Enzymatic Nucleic Acid
gccaagguggaggaaacucccuucaaggacaucguccgggacggaagg

SEQ ID NO: 6949 - RNA, 48 nt, Artificial Sequence
  Description of Artificial Sequence:  Enzymatic Nucleic Acid
gaggcggcggaggaaacucccuucaaggacaucguccgggaaggucac

SEQ ID NO: 6950 - RNA, 48 nt, Artificial Sequence
  Description of Artificial Sequence:  Enzymatic Nucleic Acid
uagaguguggaggaaacucccuucaaggacaucguccgggaugaggcg

SEQ ID NO: 6951 - RNA, 48 nt, Artificial Sequence
  Description of Artificial Sequence:  Enzymatic Nucleic Acid
cagggccuggaggaaacucccuucaaggacaucguccgggagugggca

SEQ ID NO: 6952 - RNA, 48 nt, Artificial Sequence
  Description of Artificial Sequence:  Enzymatic Nucleic Acid
gccagggcggaggaaacucccuucaaggacaucguccgggucaguggg

SEQ ID NO: 6953 - RNA, 48 nt, Artificial Sequence
  Description of Artificial Sequence:  Enzymatic Nucleic Acid
aggggggcggaggaaacucccuucaaggacaucguccgggagggccuc

SEQ ID NO: 6954 - RNA, 48 nt, Artificial Sequence
  Description of Artificial Sequence:  Enzymatic Nucleic Acid
uugagccuggaggaaacucccuucaaggacaucguccgggagguacug

SEQ ID NO: 6955 - RNA, 48 nt, Artificial Sequence
  Description of Artificial Sequence:  Enzymatic Nucleic Acid
cguugagcggaggaaacucccuucaaggacaucguccgggucagguac

SEQ ID NO: 6956 - RNA, 48 nt, Artificial Sequence
  Description of Artificial Sequence:  Enzymatic Nucleic Acid
gggguuguggaggaaacucccuucaaggacaucguccgggguugagcc

SEQ ID NO: 6957 - RNA, 48 nt, Artificial Sequence
  Description of Artificial Sequence:  Enzymatic Nucleic Acid
cacacaccggaggaaacucccuucaaggacaucguccgggagggguug

SEQ ID NO: 6958 - RNA, 48 nt, Artificial Sequence
  Description of Artificial Sequence:  Enzymatic Nucleic Acid
ucacacacggaggaaacucccuucaaggacaucguccgggcagggguu

SEQ ID NO: 6959 - RNA, 48 nt, Artificial Sequence
  Description of Artificial Sequence:  Enzymatic Nucleic Acid
ccggcaguggaggaaacucccuucaaggacaucguccgggacacaccc

SEQ ID NO: 6960 - RNA, 48 nt, Artificial Sequence
  Description of Artificial Sequence:  Enzymatic Nucleic Acid
ggcgugccggaggaaacucccuucaaggacaucguccgggggcaguca

SEQ ID NO: 6961 - RNA, 48 nt, Artificial Sequence
  Description of Artificial Sequence:  Enzymatic Nucleic Acid
gggcgugcggaggaaacucccuucaaggacaucguccgggcggcaguc

SEQ ID NO: 6962 - RNA, 48 nt, Artificial Sequence
  Description of Artificial Sequence:  Enzymatic Nucleic Acid
gccaggccggaggaaacucccuucaaggacaucguccgggagaguggg

SEQ ID NO: 6963 - RNA, 48 nt, Artificial Sequence
  Description of Artificial Sequence:  Enzymatic Nucleic Acid
agccaggcggaggaaacucccuucaaggacaucguccgggcagagugg

SEQ ID NO: 6964 - RNA, 48 nt, Artificial Sequence
  Description of Artificial Sequence:  Enzymatic Nucleic Acid
ucugcagcggaggaaacucccuucaaggacaucguccgggaggcccag

SEQ ID NO: 6965 - RNA, 48 nt, Artificial Sequence
  Description of Artificial Sequence:  Enzymatic Nucleic Acid
cggaacuuggaggaaacucccuucaaggacaucguccgggugcagcca

SEQ ID NO: 6966 - RNA, 48 nt, Artificial Sequence
  Description of Artificial Sequence:  Enzymatic Nucleic Acid
ggaggagcggaggaaacucccuucaaggacaucguccggggcggaacu

SEQ ID NO: 6967 - RNA, 48 nt, Artificial Sequence
  Description of Artificial Sequence:  Enzymatic Nucleic Acid
gggcaccuggaggaaacucccuucaaggacaucguccgggggaggagg

SEQ ID NO: 6968 - RNA, 48 nt, Artificial Sequence
  Description of Artificial Sequence:  Enzymatic Nucleic Acid
cagggcacggaggaaacucccuucaaggacaucguccgggucggagga

SEQ ID NO: 6969 - RNA, 48 nt, Artificial Sequence
  Description of Artificial Sequence:  Enzymatic Nucleic Acid
cggccagcggaggaaacucccuucaaggacaucguccgggaggcguug

SEQ ID NO: 6970 - RNA, 48 nt, Artificial Sequence
  Description of Artificial Sequence:  Enzymatic Nucleic Acid
gucacggcggaggaaacucccuucaaggacaucguccgggagccaggc

SEQ ID NO: 6971 - RNA, 48 nt, Artificial Sequence
  Description of Artificial Sequence:  Enzymatic Nucleic Acid
uuugagguggaggaaacucccuucaaggacaucguccgggacggccag

SEQ ID NO: 6972 - RNA, 48 nt, Artificial Sequence
  Description of Artificial Sequence:  Enzymatic Nucleic Acid
cugcagguggaggaaacucccuucaaggacaucguccgggauuggcag

SEQ ID NO: 6973 - RNA, 48 nt, Artificial Sequence
  Description of Artificial Sequence:  Enzymatic Nucleic Acid
gcgcagccggaggaaacucccuucaaggacaucguccgggugcagguc

SEQ ID NO: 6974 - RNA, 48 nt, Artificial Sequence
  Description of Artificial Sequence:  Enzymatic Nucleic Acid
agcgcagcggaggaaacucccuucaaggacaucguccgggcugcaggu

SEQ ID NO: 6975 - RNA, 48 nt, Artificial Sequence
  Description of Artificial Sequence:  Enzymatic Nucleic Acid
ccgguggcggaggaaacucccuucaaggacaucguccgggacagcgca

SEQ ID NO: 6976 - RNA, 48 nt, Artificial Sequence
  Description of Artificial Sequence:  Enzymatic Nucleic Acid
guaagggcggaggaaacucccuucaaggacaucguccggggguggcca

SEQ ID NO: 6977 - RNA, 48 nt, Artificial Sequence
  Description of Artificial Sequence:  Enzymatic Nucleic Acid
ugccggucggaggaaacucccuucaaggacaucguccgggagauggga

SEQ ID NO: 6978 - RNA, 48 nt, Artificial Sequence
  Description of Artificial Sequence:  Enzymatic Nucleic Acid
cugccgguggaggaaacucccuucaaggacaucguccgggcagauggg

SEQ ID NO: 6979 - RNA, 48 nt, Artificial Sequence
  Description of Artificial Sequence:  Enzymatic Nucleic Acid
ggcccugcggaggaaacucccuucaaggacaucguccggggguccaga

SEQ ID NO: 6980 - RNA, 48 nt, Artificial Sequence
  Description of Artificial Sequence:  Enzymatic Nucleic Acid
cgguggccggaggaaacucccuucaaggacaucguccgggugccgguc

SEQ ID NO: 6981 - RNA, 48 nt, Artificial Sequence
  Description of Artificial Sequence:  Enzymatic Nucleic Acid
ucgguggcggaggaaacucccuucaaggacaucguccgggcugccggu

SEQ ID NO: 6982 - RNA, 48 nt, Artificial Sequence
  Description of Artificial Sequence:  Enzymatic Nucleic Acid
cuccucauggaggaaacucccuucaaggacaucguccggggguggccc

SEQ ID NO: 6983 - RNA, 48 nt, Artificial Sequence
  Description of Artificial Sequence:  Enzymatic Nucleic Acid
cggcuccuggaggaaacucccuucaaggacaucguccgggaucggugg

SEQ ID NO: 6984 - RNA, 48 nt, Artificial Sequence
  Description of Artificial Sequence:  Enzymatic Nucleic Acid
agcggcucggaggaaacucccuucaaggacaucguccgggucaucggu

SEQ ID NO: 6985 - RNA, 48 nt, Artificial Sequence
  Description of Artificial Sequence:  Enzymatic Nucleic Acid
cagcggcuggaggaaacucccuucaaggacaucguccgggcucaucgg

SEQ ID NO: 6986 - RNA, 48 nt, Artificial Sequence
  Description of Artificial Sequence:  Enzymatic Nucleic Acid
ggaagcccggaggaaacucccuucaaggacaucguccgggagcggcuc

SEQ ID NO: 6987 - RNA, 48 nt, Artificial Sequence
  Description of Artificial Sequence:  Enzymatic Nucleic Acid
gggaagccggaggaaacucccuucaaggacaucguccgggcagcggcu

SEQ ID NO: 6988 - RNA, 48 nt, Artificial Sequence
  Description of Artificial Sequence:  Enzymatic Nucleic Acid
ugggaagcggaggaaacucccuucaaggacaucguccgggccagcggc

SEQ ID NO: 6989 - RNA, 48 nt, Artificial Sequence
  Description of Artificial Sequence:  Enzymatic Nucleic Acid
agcggcauggaggaaacucccuucaaggacaucguccggguggcuggc

SEQ ID NO: 6990 - RNA, 48 nt, Artificial Sequence
  Description of Artificial Sequence:  Enzymatic Nucleic Acid
ggccuuguggaggaaacucccuucaaggacaucguccgggagcggcau

SEQ ID NO: 6991 - RNA, 48 nt, Artificial Sequence
  Description of Artificial Sequence:  Enzymatic Nucleic Acid
acugaggcggaggaaacucccuucaaggacaucguccggguugucagc

SEQ ID NO: 6992 - RNA, 48 nt, Artificial Sequence
  Description of Artificial Sequence:  Enzymatic Nucleic Acid
ccaggcucggaggaaacucccuucaaggacaucguccgggaguacuga

SEQ ID NO: 6993 - RNA, 48 nt, Artificial Sequence
  Description of Artificial Sequence:  Enzymatic Nucleic Acid
uccaggcuggaggaaacucccuucaaggacaucguccgggcaguacug

SEQ ID NO: 6994 - RNA, 48 nt, Artificial Sequence
  Description of Artificial Sequence:  Enzymatic Nucleic Acid
uggucuucggaggaaacucccuucaaggacaucguccgggaggcucca

SEQ ID NO: 6995 - RNA, 48 nt, Artificial Sequence
  Description of Artificial Sequence:  Enzymatic Nucleic Acid
cuggucuuggaggaaacucccuucaaggacaucguccgggcaggcucc

SEQ ID NO: 6996 - RNA, 48 nt, Artificial Sequence
  Description of Artificial Sequence:  Enzymatic Nucleic Acid
aagcugguggaggaaacucccuucaaggacaucguccggguuccaggc

SEQ ID NO: 6997 - RNA, 48 nt, Artificial Sequence
  Description of Artificial Sequence:  Enzymatic Nucleic Acid
uugccugcggaggaaacucccuucaaggacaucguccggggaagcugg

SEQ ID NO: 6998 - RNA, 48 nt, Artificial Sequence
  Description of Artificial Sequence:  Enzymatic Nucleic Acid
cgcauugcggaggaaacucccuucaaggacaucguccgggugccgaag

SEQ ID NO: 6999 - RNA, 48 nt, Artificial Sequence
  Description of Artificial Sequence:  Enzymatic Nucleic Acid
cgucccuuggaggaaacucccuucaaggacaucguccgggagcgcauu

SEQ ID NO: 7000 - RNA, 48 nt, Artificial Sequence
  Description of Artificial Sequence:  Enzymatic Nucleic Acid
acgcguccggaggaaacucccuucaaggacaucguccggguucagcgc

SEQ ID NO: 7001 - RNA, 48 nt, Artificial Sequence
  Description of Artificial Sequence:  Enzymatic Nucleic Acid
cacgcgucggaggaaacucccuucaaggacaucguccgggcuucagcg

SEQ ID NO: 7002 - RNA, 48 nt, Artificial Sequence
  Description of Artificial Sequence:  Enzymatic Nucleic Acid
gcacgcguggaggaaacucccuucaaggacaucguccgggccuucagc

SEQ ID NO: 7003 - RNA, 48 nt, Artificial Sequence
  Description of Artificial Sequence:  Enzymatic Nucleic Acid
gcugucacggaggaaacucccuucaaggacaucguccggggggcggca

SEQ ID NO: 7004 - RNA, 48 nt, Artificial Sequence
  Description of Artificial Sequence:  Enzymatic Nucleic Acid
cgggcuguggaggaaacucccuucaaggacaucguccgggaccgggcg

SEQ ID NO: 7005 - RNA, 48 nt, Artificial Sequence
  Description of Artificial Sequence:  Enzymatic Nucleic Acid
ccguugccggaggaaacucccuucaaggacaucguccgggggcgggcu

SEQ ID NO: 7006 - RNA, 48 nt, Artificial Sequence
  Description of Artificial Sequence:  Enzymatic Nucleic Acid
gccguugcggaggaaacucccuucaaggacaucguccgggcggcgggc

SEQ ID NO: 7007 - RNA, 48 nt, Artificial Sequence
  Description of Artificial Sequence:  Enzymatic Nucleic Acid
gccagagcggaggaaacucccuucaaggacaucguccgggguugcccg

SEQ ID NO: 7008 - RNA, 48 nt, Artificial Sequence
  Description of Artificial Sequence:  Enzymatic Nucleic Acid
ccgugggcggaggaaacucccuucaaggacaucguccgggagagccgu

SEQ ID NO: 7009 - RNA, 48 nt, Artificial Sequence
  Description of Artificial Sequence:  Enzymatic Nucleic Acid
ugaugugcggaggaaacucccuucaaggacaucguccggggugggcca

SEQ ID NO: 7010 - RNA, 48 nt, Artificial Sequence
  Description of Artificial Sequence:  Enzymatic Nucleic Acid
gggugaguggaggaaacucccuucaaggacaucguccgggauugaugu

SEQ ID NO: 7011 - RNA, 48 nt, Artificial Sequence
  Description of Artificial Sequence:  Enzymatic Nucleic Acid
cagaguccggaggaaacucccuucaaggacaucguccgggaaagggug

SEQ ID NO: 7012 - RNA, 48 nt, Artificial Sequence
  Description of Artificial Sequence:  Enzymatic Nucleic Acid
gcagagucggaggaaacucccuucaaggacaucguccgggcaaagggu

SEQ ID NO: 7013 - RNA, 48 nt, Artificial Sequence
  Description of Artificial Sequence:  Enzymatic Nucleic Acid
ggcagaguggaggaaacucccuucaaggacaucguccgggccaaaggg

SEQ ID NO: 7014 - RNA, 48 nt, Artificial Sequence
  Description of Artificial Sequence:  Enzymatic Nucleic Acid
agcagagcggaggaaacucccuucaaggacaucguccgggaggcagag

SEQ ID NO: 7015 - RNA, 48 nt, Artificial Sequence
  Description of Artificial Sequence:  Enzymatic Nucleic Acid
cgggggcuggaggaaacucccuucaaggacaucguccgggagcagagc

SEQ ID NO: 7016 - RNA, 48 nt, Artificial Sequence
  Description of Artificial Sequence:  Enzymatic Nucleic Acid
ccucgggcggaggaaacucccuucaaggacaucguccggggcacugca

SEQ ID NO: 7017 - RNA, 48 nt, Artificial Sequence
  Description of Artificial Sequence:  Enzymatic Nucleic Acid
ggagcccuggaggaaacucccuucaaggacaucguccggggggccgca

SEQ ID NO: 7018 - RNA, 48 nt, Artificial Sequence
  Description of Artificial Sequence:  Enzymatic Nucleic Acid
ucggagccggaggaaacucccuucaaggacaucguccgggucgggccg

SEQ ID NO: 7019 - RNA, 48 nt, Artificial Sequence
  Description of Artificial Sequence:  Enzymatic Nucleic Acid
cucggagcggaggaaacucccuucaaggacaucguccgggcucgggcc

SEQ ID NO: 7020 - RNA, 48 nt, Artificial Sequence
  Description of Artificial Sequence:  Enzymatic Nucleic Acid
ugguggcuggaggaaacucccuucaaggacaucguccgggggagcccu

SEQ ID NO: 7021 - RNA, 48 nt, Artificial Sequence
  Description of Artificial Sequence:  Enzymatic Nucleic Acid
ggggaaccggaggaaacucccuucaaggacaucguccgggugguggcu

SEQ ID NO: 7022 - RNA, 48 nt, Artificial Sequence
  Description of Artificial Sequence:  Enzymatic Nucleic Acid
uggggaacggaggaaacucccuucaaggacaucguccgggcugguggc

SEQ ID NO: 7023 - RNA, 48 nt, Artificial Sequence
  Description of Artificial Sequence:  Enzymatic Nucleic Acid
cgagggccggaggaaacucccuucaaggacaucguccggggagguggg

SEQ ID NO: 7024 - RNA, 48 nt, Artificial Sequence
  Description of Artificial Sequence:  Enzymatic Nucleic Acid
gcgagggcggaggaaacucccuucaaggacaucguccgggcgaggugg

SEQ ID NO: 7025 - RNA, 48 nt, Artificial Sequence
  Description of Artificial Sequence:  Enzymatic Nucleic Acid
cuggccucggaggaaacucccuucaaggacaucguccgggggcgaggg

SEQ ID NO: 7026 - RNA, 48 nt, Artificial Sequence
  Description of Artificial Sequence:  Enzymatic Nucleic Acid
ccuggccuggaggaaacucccuucaaggacaucguccgggcggcgagg

SEQ ID NO: 7027 - RNA, 48 nt, Artificial Sequence
  Description of Artificial Sequence:  Enzymatic Nucleic Acid
agccuggcggaggaaacucccuucaaggacaucguccggguccggcga

SEQ ID NO: 7028 - RNA, 48 nt, Artificial Sequence
  Description of Artificial Sequence:  Enzymatic Nucleic Acid
ugaacagcggaggaaacucccuucaaggacaucguccggguggccucc

SEQ ID NO: 7029 - RNA, 48 nt, Artificial Sequence
  Description of Artificial Sequence:  Enzymatic Nucleic Acid
gugcgguuggaggaaacucccuucaaggacaucguccggguugcguga

SEQ ID NO: 7030 - RNA, 48 nt, Artificial Sequence
  Description of Artificial Sequence:  Enzymatic Nucleic Acid
gccuggccggaggaaacucccuucaaggacaucguccgggagacggca

SEQ ID NO: 7031 - RNA, 48 nt, Artificial Sequence
  Description of Artificial Sequence:  Enzymatic Nucleic Acid
ugccuggcggaggaaacucccuucaaggacaucguccgggcagacggc

SEQ ID NO: 7032 - RNA, 48 nt, Artificial Sequence
  Description of Artificial Sequence:  Enzymatic Nucleic Acid
cugccugcggaggaaacucccuucaaggacaucguccggguggcccag

SEQ ID NO: 7033 - RNA, 48 nt, Artificial Sequence
  Description of Artificial Sequence:  Enzymatic Nucleic Acid
cccgcugcggaggaaacucccuucaaggacaucguccgggugccuggc

SEQ ID NO: 7034 - RNA, 48 nt, Artificial Sequence
  Description of Artificial Sequence:  Enzymatic Nucleic Acid
gccaccccggaggaaacucccuucaaggacaucguccggggcugccug

SEQ ID NO: 7035 - RNA, 48 nt, Artificial Sequence
  Description of Artificial Sequence:  Enzymatic Nucleic Acid
cgccacccggaggaaacucccuucaaggacaucguccgggcgcugccu

SEQ ID NO: 7036 - RNA, 48 nt, Artificial Sequence
  Description of Artificial Sequence:  Enzymatic Nucleic Acid
ccgccaccggaggaaacucccuucaaggacaucguccgggccgcugcc

SEQ ID NO: 7037 - RNA, 48 nt, Artificial Sequence
  Description of Artificial Sequence:  Enzymatic Nucleic Acid
cccgccacggaggaaacucccuucaaggacaucguccgggcccgcugc

SEQ ID NO: 7038 - RNA, 48 nt, Artificial Sequence
  Description of Artificial Sequence:  Enzymatic Nucleic Acid
agucccgcggaggaaacucccuucaaggacaucguccgggacccccgc

SEQ ID NO: 7039 - RNA, 48 nt, Artificial Sequence
  Description of Artificial Sequence:  Enzymatic Nucleic Acid
accaguccggaggaaacucccuucaaggacaucguccggggccacccc

SEQ ID NO: 7040 - RNA, 48 nt, Artificial Sequence
  Description of Artificial Sequence:  Enzymatic Nucleic Acid
caccagucggaggaaacucccuucaaggacaucguccgggcgccaccc

SEQ ID NO: 7041 - RNA, 48 nt, Artificial Sequence
  Description of Artificial Sequence:  Enzymatic Nucleic Acid
ucaccaguggaggaaacucccuucaaggacaucguccgggccgccacc

SEQ ID NO: 7042 - RNA, 48 nt, Artificial Sequence
  Description of Artificial Sequence:  Enzymatic Nucleic Acid
ugagucacggaggaaacucccuucaaggacaucguccgggagucccgc

SEQ ID NO: 7043 - RNA, 48 nt, Artificial Sequence
  Description of Artificial Sequence:  Enzymatic Nucleic Acid
uucugaguggaggaaacucccuucaaggacaucguccgggaccagucc

SEQ ID NO: 7044 - RNA, 48 nt, Artificial Sequence
  Description of Artificial Sequence:  Enzymatic Nucleic Acid
ugagccuuggaggaaacucccuucaaggacaucguccgggugagucac

SEQ ID NO: 7045 - RNA, 48 nt, Artificial Sequence
  Description of Artificial Sequence:  Enzymatic Nucleic Acid
accugagcggaggaaacucccuucaaggacaucguccggguucugagu

SEQ ID NO: 7046 - RNA, 48 nt, Artificial Sequence
  Description of Artificial Sequence:  Enzymatic Nucleic Acid
uagggcacggaggaaacucccuucaaggacaucguccgggugagccuu

SEQ ID NO: 7047 - RNA, 48 nt, Artificial Sequence
  Description of Artificial Sequence:  Enzymatic Nucleic Acid
gccaggccggaggaaacucccuucaaggacaucguccgggaggggggu

SEQ ID NO: 7048 - RNA, 48 nt, Artificial Sequence
  Description of Artificial Sequence:  Enzymatic Nucleic Acid
cgccaggcggaggaaacucccuucaaggacaucguccgggcagggggg

SEQ ID NO: 7049 - RNA, 48 nt, Artificial Sequence
  Description of Artificial Sequence:  Enzymatic Nucleic Acid
accagcgcggaggaaacucccuucaaggacaucguccgggaggcccag

SEQ ID NO: 7050 - RNA, 48 nt, Artificial Sequence
  Description of Artificial Sequence:  Enzymatic Nucleic Acid
cacagcacggaggaaacucccuucaaggacaucguccgggagcgccag

SEQ ID NO: 7051 - RNA, 48 nt, Artificial Sequence
  Description of Artificial Sequence:  Enzymatic Nucleic Acid
gcacugucggaggaaacucccuucaaggacaucguccgggacagcacc

SEQ ID NO: 7052 - RNA, 48 nt, Artificial Sequence
  Description of Artificial Sequence:  Enzymatic Nucleic Acid
agcacuguggaggaaacucccuucaaggacaucguccgggcacagcac

SEQ ID NO: 7053 - RNA, 48 nt, Artificial Sequence
  Description of Artificial Sequence:  Enzymatic Nucleic Acid
gcagggccggaggaaacucccuucaaggacaucguccgggaagcacug

SEQ ID NO: 7054 - RNA, 48 nt, Artificial Sequence
  Description of Artificial Sequence:  Enzymatic Nucleic Acid
agcagggcggaggaaacucccuucaaggacaucguccgggcaagcacu

SEQ ID NO: 7055 - RNA, 48 nt, Artificial Sequence
  Description of Artificial Sequence:  Enzymatic Nucleic Acid
cuggggguggaggaaacucccuucaaggacaucguccgggagcagggc

SEQ ID NO: 7056 - RNA, 38 nt, Artificial Sequence
  Description of Artificial Sequence:  Enzymatic Nucleic Acid
uggaucaccugaugaggccguuaggccgaaagggccau

SEQ ID NO: 7057 - RNA, 38 nt, Artificial Sequence
  Description of Artificial Sequence:  Enzymatic Nucleic Acid
cccaccugcugaugaggccguuaggccgaaaucacaag

SEQ ID NO: 7058 - RNA, 38 nt, Artificial Sequence
  Description of Artificial Sequence:  Enzymatic Nucleic Acid
cugggccucugaugaggccguuaggccgaaaguuuccc

SEQ ID NO: 7059 - RNA, 38 nt, Artificial Sequence
  Description of Artificial Sequence:  Enzymatic Nucleic Acid
gggauugacugaugaggccguuaggccgaaagucugcg

SEQ ID NO: 7060 - RNA, 38 nt, Artificial Sequence
  Description of Artificial Sequence:  Enzymatic Nucleic Acid
cugggauucugaugaggccguuaggccgaaauagucug

SEQ ID NO: 7061 - RNA, 38 nt, Artificial Sequence
  Description of Artificial Sequence:  Enzymatic Nucleic Acid
gagacuggcugaugaggccguuaggccgaaauugauag

SEQ ID NO: 7062 - RNA, 38 nt, Artificial Sequence
  Description of Artificial Sequence:  Enzymatic Nucleic Acid
ggggaagacugaugaggccguuaggccgaaacugggau

SEQ ID NO: 7063 - RNA, 38 nt, Artificial Sequence
  Description of Artificial Sequence:  Enzymatic Nucleic Acid
gaggggaacugaugaggccguuaggccgaaagacuggg

SEQ ID NO: 7064 - RNA, 38 nt, Artificial Sequence
  Description of Artificial Sequence:  Enzymatic Nucleic Acid
gugaggggcugaugaggccguuaggccgaaagagacug

SEQ ID NO: 7065 - RNA, 38 nt, Artificial Sequence
  Description of Artificial Sequence:  Enzymatic Nucleic Acid
agugagggcugaugaggccguuaggccgaaaagagacu

SEQ ID NO: 7066 - RNA, 38 nt, Artificial Sequence
  Description of Artificial Sequence:  Enzymatic Nucleic Acid
cagggagucugaugaggccguuaggccgaaaggggaag

SEQ ID NO: 7067 - RNA, 38 nt, Artificial Sequence
  Description of Artificial Sequence:  Enzymatic Nucleic Acid
uucacaggcugaugaggccguuaggccgaaagugaggg

SEQ ID NO: 7068 - RNA, 38 nt, Artificial Sequence
  Description of Artificial Sequence:  Enzymatic Nucleic Acid
augcuggacugaugaggccguuaggccgaaagcuucac

SEQ ID NO: 7069 - RNA, 38 nt, Artificial Sequence
  Description of Artificial Sequence:  Enzymatic Nucleic Acid
ugaugcugcugaugaggccguuaggccgaaagagcuuc

SEQ ID NO: 7070 - RNA, 38 nt, Artificial Sequence
  Description of Artificial Sequence:  Enzymatic Nucleic Acid
accucgaucugaugaggccguuaggccgaaaugcugga

SEQ ID NO: 7071 - RNA, 38 nt, Artificial Sequence
  Description of Artificial Sequence:  Enzymatic Nucleic Acid
gggaccuccugaugaggccguuaggccgaaaugaugcu

SEQ ID NO: 7072 - RNA, 38 nt, Artificial Sequence
  Description of Artificial Sequence:  Enzymatic Nucleic Acid
gcugauggcugaugaggccguuaggccgaaaccucgau

SEQ ID NO: 7073 - RNA, 38 nt, Artificial Sequence
  Description of Artificial Sequence:  Enzymatic Nucleic Acid
caagggcucugaugaggccguuaggccgaaaugggacc

SEQ ID NO: 7074 - RNA, 38 nt, Artificial Sequence
  Description of Artificial Sequence:  Enzymatic Nucleic Acid
aacagggccugaugaggccguuaggccgaaagggcuga

SEQ ID NO: 7075 - RNA, 38 nt, Artificial Sequence
  Description of Artificial Sequence:  Enzymatic Nucleic Acid
auucaucccugaugaggccguuaggccgaaacagggca

SEQ ID NO: 7076 - RNA, 38 nt, Artificial Sequence
  Description of Artificial Sequence:  Enzymatic Nucleic Acid
gaggugcccugaugaggccguuaggccgaaauucaucc

SEQ ID NO: 7077 - RNA, 38 nt, Artificial Sequence
  Description of Artificial Sequence:  Enzymatic Nucleic Acid
cucuuccacugaugaggccguuaggccgaaaggugccu

SEQ ID NO: 7078 - RNA, 38 nt, Artificial Sequence
  Description of Artificial Sequence:  Enzymatic Nucleic Acid
uacguccucugaugaggccguuaggccgaaaucugcug

SEQ ID NO: 7079 - RNA, 38 nt, Artificial Sequence
  Description of Artificial Sequence:  Enzymatic Nucleic Acid
ucgcccagcugaugaggccguuaggccgaaacguccug

SEQ ID NO: 7080 - RNA, 38 nt, Artificial Sequence
  Description of Artificial Sequence:  Enzymatic Nucleic Acid
ccagaggacugaugaggccguuaggccgaaacucuucg

SEQ ID NO: 7081 - RNA, 38 nt, Artificial Sequence
  Description of Artificial Sequence:  Enzymatic Nucleic Acid
ccccagagcugaugaggccguuaggccgaaagacucuu

SEQ ID NO: 7082 - RNA, 38 nt, Artificial Sequence
  Description of Artificial Sequence:  Enzymatic Nucleic Acid
cuuccccacugaugaggccguuaggccgaaaggagacu

SEQ ID NO: 7083 - RNA, 38 nt, Artificial Sequence
  Description of Artificial Sequence:  Enzymatic Nucleic Acid
cuguucugcugaugaggccguuaggccgaaaggcaggu

SEQ ID NO: 7084 - RNA, 38 nt, Artificial Sequence
  Description of Artificial Sequence:  Enzymatic Nucleic Acid
ccuguucucugaugaggccguuaggccgaaaaggcagg

SEQ ID NO: 7085 - RNA, 38 nt, Artificial Sequence
  Description of Artificial Sequence:  Enzymatic Nucleic Acid
ggucucagcugaugaggccguuaggccgaaagcgcccu

SEQ ID NO: 7086 - RNA, 38 nt, Artificial Sequence
  Description of Artificial Sequence:  Enzymatic Nucleic Acid
cagcgcugcugaugaggccguuaggccgaaagggucuc

SEQ ID NO: 7087 - RNA, 38 nt, Artificial Sequence
  Description of Artificial Sequence:  Enzymatic Nucleic Acid
gagcucuucugaugaggccguuaggccgaaauucuccu

SEQ ID NO: 7088 - RNA, 38 nt, Artificial Sequence
  Description of Artificial Sequence:  Enzymatic Nucleic Acid
gcaucucgcugaugaggccguuaggccgaaagcucuug

SEQ ID NO: 7089 - RNA, 38 nt, Artificial Sequence
  Description of Artificial Sequence:  Enzymatic Nucleic Acid
cucugccgcugaugaggccguuaggccgaaauggcauc

SEQ ID NO: 7090 - RNA, 38 nt, Artificial Sequence
  Description of Artificial Sequence:  Enzymatic Nucleic Acid
ucccgcagcugaugaggccguuaggccgaaaucugguu

SEQ ID NO: 7091 - RNA, 38 nt, Artificial Sequence
  Description of Artificial Sequence:  Enzymatic Nucleic Acid
cucccgcacugaugaggccguuaggccgaaaaucuggu

SEQ ID NO: 7092 - RNA, 38 nt, Artificial Sequence
  Description of Artificial Sequence:  Enzymatic Nucleic Acid
aaaugcagcugaugaggccguuaggccgaaagcuccuc

SEQ ID NO: 7093 - RNA, 38 nt, Artificial Sequence
  Description of Artificial Sequence:  Enzymatic Nucleic Acid
gaaaugcacugaugaggccguuaggccgaaaagcuccu

SEQ ID NO: 7094 - RNA, 38 nt, Artificial Sequence
  Description of Artificial Sequence:  Enzymatic Nucleic Acid
ggcuuggacugaugaggccguuaggccgaaaugcagaa

SEQ ID NO: 7095 - RNA, 38 nt, Artificial Sequence
  Description of Artificial Sequence:  Enzymatic Nucleic Acid
uggcuuggcugaugaggccguuaggccgaaaaugcaga

SEQ ID NO: 7096 - RNA, 38 nt, Artificial Sequence
  Description of Artificial Sequence:  Enzymatic Nucleic Acid
cuggcuugcugaugaggccguuaggccgaaaaaugcag

SEQ ID NO: 7097 - RNA, 38 nt, Artificial Sequence
  Description of Artificial Sequence:  Enzymatic Nucleic Acid
acaugaggcugaugaggccguuaggccgaaacuccuuc

SEQ ID NO: 7098 - RNA, 38 nt, Artificial Sequence
  Description of Artificial Sequence:  Enzymatic Nucleic Acid
cacaugagcugaugaggccguuaggccgaaaacuccuu

SEQ ID NO: 7099 - RNA, 38 nt, Artificial Sequence
  Description of Artificial Sequence:  Enzymatic Nucleic Acid
uugcacaucugaugaggccguuaggccgaaaggaacuc

SEQ ID NO: 7100 - RNA, 38 nt, Artificial Sequence
  Description of Artificial Sequence:  Enzymatic Nucleic Acid
ccuccuggcugaugaggccguuaggccgaaacuugcac

SEQ ID NO: 7101 - RNA, 38 nt, Artificial Sequence
  Description of Artificial Sequence:  Enzymatic Nucleic Acid
gccuccugcugaugaggccguuaggccgaaaacuugca

SEQ ID NO: 7102 - RNA, 38 nt, Artificial Sequence
  Description of Artificial Sequence:  Enzymatic Nucleic Acid
uccaggcccugaugaggccguuaggccgaaagucucuc

SEQ ID NO: 7103 - RNA, 38 nt, Artificial Sequence
  Description of Artificial Sequence:  Enzymatic Nucleic Acid
uucagauccugaugaggccguuaggccgaaagcuucuc

SEQ ID NO: 7104 - RNA, 38 nt, Artificial Sequence
  Description of Artificial Sequence:  Enzymatic Nucleic Acid
ccucuucacugaugaggccguuaggccgaaaucgagcu

SEQ ID NO: 7105 - RNA, 38 nt, Artificial Sequence
  Description of Artificial Sequence:  Enzymatic Nucleic Acid
cucccgcacugaugaggccguuaggccgaaagccugcu

SEQ ID NO: 7106 - RNA, 38 nt, Artificial Sequence
  Description of Artificial Sequence:  Enzymatic Nucleic Acid
cuuucacacugaugaggccguuaggccgaaaggccuug

SEQ ID NO: 7107 - RNA, 38 nt, Artificial Sequence
  Description of Artificial Sequence:  Enzymatic Nucleic Acid
cgagcaagcugaugaggccguuaggccgaaacgucacc

SEQ ID NO: 7108 - RNA, 38 nt, Artificial Sequence
  Description of Artificial Sequence:  Enzymatic Nucleic Acid
ccccgagccugaugaggccguuaggccgaaaggacguc

SEQ ID NO: 7109 - RNA, 38 nt, Artificial Sequence
  Description of Artificial Sequence:  Enzymatic Nucleic Acid
agcucccccugaugaggccguuaggccgaaagcaagga

SEQ ID NO: 7110 - RNA, 38 nt, Artificial Sequence
  Description of Artificial Sequence:  Enzymatic Nucleic Acid
cuccaagccugaugaggccguuaggccgaaacucuggc

SEQ ID NO: 7111 - RNA, 38 nt, Artificial Sequence
  Description of Artificial Sequence:  Enzymatic Nucleic Acid
cagccucccugaugaggccguuaggccgaaagcgacuc

SEQ ID NO: 7112 - RNA, 38 nt, Artificial Sequence
  Description of Artificial Sequence:  Enzymatic Nucleic Acid
gcauuccucugaugaggccguuaggccgaaaguggcag

SEQ ID NO: 7113 - RNA, 38 nt, Artificial Sequence
  Description of Artificial Sequence:  Enzymatic Nucleic Acid
acccuccacugaugaggccguuaggccgaaagccuggc

SEQ ID NO: 7114 - RNA, 38 nt, Artificial Sequence
  Description of Artificial Sequence:  Enzymatic Nucleic Acid
ccgggccccugaugaggccguuaggccgaaacccucca

SEQ ID NO: 7115 - RNA, 38 nt, Artificial Sequence
  Description of Artificial Sequence:  Enzymatic Nucleic Acid
uccaugcgcugaugaggccguuaggccgaaagcgcggc

SEQ ID NO: 7116 - RNA, 38 nt, Artificial Sequence
  Description of Artificial Sequence:  Enzymatic Nucleic Acid
ucuccucccugaugaggccguuaggccgaaaggcggcc

SEQ ID NO: 7117 - RNA, 38 nt, Artificial Sequence
  Description of Artificial Sequence:  Enzymatic Nucleic Acid
ccaccugccugaugaggccguuaggccgaaacugggcc

SEQ ID NO: 7118 - RNA, 38 nt, Artificial Sequence
  Description of Artificial Sequence:  Enzymatic Nucleic Acid
gcuggugacugaugaggccguuaggccgaaaggccacc

SEQ ID NO: 7119 - RNA, 38 nt, Artificial Sequence
  Description of Artificial Sequence:  Enzymatic Nucleic Acid
gagcuggucugaugaggccguuaggccgaaauaggcca

SEQ ID NO: 7120 - RNA, 38 nt, Artificial Sequence
  Description of Artificial Sequence:  Enzymatic Nucleic Acid
ucuuggaacugaugaggccguuaggccgaaagcuggug

SEQ ID NO: 7121 - RNA, 38 nt, Artificial Sequence
  Description of Artificial Sequence:  Enzymatic Nucleic Acid
auucuuggcugaugaggccguuaggccgaaagagcugg

SEQ ID NO: 7122 - RNA, 38 nt, Artificial Sequence
  Description of Artificial Sequence:  Enzymatic Nucleic Acid
uauucuugcugaugaggccguuaggccgaaaagagcug

SEQ ID NO: 7123 - RNA, 38 nt, Artificial Sequence
  Description of Artificial Sequence:  Enzymatic Nucleic Acid
gguugucgcugaugaggccguuaggccgaaauucuugg

SEQ ID NO: 7124 - RNA, 38 nt, Artificial Sequence
  Description of Artificial Sequence:  Enzymatic Nucleic Acid
cugcucuucugaugaggccguuaggccgaaaugugguu

SEQ ID NO: 7125 - RNA, 38 nt, Artificial Sequence
  Description of Artificial Sequence:  Enzymatic Nucleic Acid
cuguuugacugaugaggccguuaggccgaaaucuucca

SEQ ID NO: 7126 - RNA, 38 nt, Artificial Sequence
  Description of Artificial Sequence:  Enzymatic Nucleic Acid
ugcuguuucugaugaggccguuaggccgaaagaucuuc

SEQ ID NO: 7127 - RNA, 38 nt, Artificial Sequence
  Description of Artificial Sequence:  Enzymatic Nucleic Acid
gccugcugcugaugaggccguuaggccgaaagcugcug

SEQ ID NO: 7128 - RNA, 38 nt, Artificial Sequence
  Description of Artificial Sequence:  Enzymatic Nucleic Acid
agcuuauccugaugaggccguuaggccgaaaucaccuc

SEQ ID NO: 7129 - RNA, 38 nt, Artificial Sequence
  Description of Artificial Sequence:  Enzymatic Nucleic Acid
cuucagcucugaugaggccguuaggccgaaaucgauca

SEQ ID NO: 7130 - RNA, 38 nt, Artificial Sequence
  Description of Artificial Sequence:  Enzymatic Nucleic Acid
uccaucaccugaugaggccguuaggccgaaaucuugug

SEQ ID NO: 7131 - RNA, 38 nt, Artificial Sequence
  Description of Artificial Sequence:  Enzymatic Nucleic Acid
agcaccggcugaugaggccguuaggccgaaacggucuc

SEQ ID NO: 7132 - RNA, 38 nt, Artificial Sequence
  Description of Artificial Sequence:  Enzymatic Nucleic Acid
cagcaccgcugaugaggccguuaggccgaaaacggucu

SEQ ID NO: 7133 - RNA, 38 nt, Artificial Sequence
  Description of Artificial Sequence:  Enzymatic Nucleic Acid
cuuguagacugaugaggccguuaggccgaaauccgccu

SEQ ID NO: 7134 - RNA, 38 nt, Artificial Sequence
  Description of Artificial Sequence:  Enzymatic Nucleic Acid
gccuuguacugaugaggccguuaggccgaaauauccgc

SEQ ID NO: 7135 - RNA, 38 nt, Artificial Sequence
  Description of Artificial Sequence:  Enzymatic Nucleic Acid
ccgccuugcugaugaggccguuaggccgaaagauaucc

SEQ ID NO: 7136 - RNA, 38 nt, Artificial Sequence
  Description of Artificial Sequence:  Enzymatic Nucleic Acid
cagccuggcugaugaggccguuaggccgaaaguccgcc

SEQ ID NO: 7137 - RNA, 38 nt, Artificial Sequence
  Description of Artificial Sequence:  Enzymatic Nucleic Acid
ucagccugcugaugaggccguuaggccgaaaaguccgc

SEQ ID NO: 7138 - RNA, 38 nt, Artificial Sequence
  Description of Artificial Sequence:  Enzymatic Nucleic Acid
uccugcagcugaugaggccguuaggccgaaagcuccuu

SEQ ID NO: 7139 - RNA, 38 nt, Artificial Sequence
  Description of Artificial Sequence:  Enzymatic Nucleic Acid
guuugcugcugaugaggccguuaggccgaaacucccuc

SEQ ID NO: 7140 - RNA, 38 nt, Artificial Sequence
  Description of Artificial Sequence:  Enzymatic Nucleic Acid
cgacuccucugaugaggccguuaggccgaaacagcugg

SEQ ID NO: 7141 - RNA, 38 nt, Artificial Sequence
  Description of Artificial Sequence:  Enzymatic Nucleic Acid
uccuggcccugaugaggccguuaggccgaaacuccuga

SEQ ID NO: 7142 - RNA, 38 nt, Artificial Sequence
  Description of Artificial Sequence:  Enzymatic Nucleic Acid
auguccuccugaugaggccguuaggccgaaauccuggc

SEQ ID NO: 7143 - RNA, 38 nt, Artificial Sequence
  Description of Artificial Sequence:  Enzymatic Nucleic Acid
gagaccuccugaugaggccguuaggccgaaacaugccg

SEQ ID NO: 7144 - RNA, 38 nt, Artificial Sequence
  Description of Artificial Sequence:  Enzymatic Nucleic Acid
gccugggacugaugaggccguuaggccgaaaccucgac

SEQ ID NO: 7145 - RNA, 38 nt, Artificial Sequence
  Description of Artificial Sequence:  Enzymatic Nucleic Acid
gggccuggcugaugaggccguuaggccgaaagaccucg

SEQ ID NO: 7146 - RNA, 38 nt, Artificial Sequence
  Description of Artificial Sequence:  Enzymatic Nucleic Acid
cggggggccugaugaggccguuaggccgaaagggggcc

SEQ ID NO: 7147 - RNA, 38 nt, Artificial Sequence
  Description of Artificial Sequence:  Enzymatic Nucleic Acid
aggagaggcugaugaggccguuaggccgaaaggcaggg

SEQ ID NO: 7148 - RNA, 38 nt, Artificial Sequence
  Description of Artificial Sequence:  Enzymatic Nucleic Acid
ggagaggacugaugaggccguuaggccgaaagguaggc

SEQ ID NO: 7149 - RNA, 38 nt, Artificial Sequence
  Description of Artificial Sequence:  Enzymatic Nucleic Acid
ggggagagcugaugaggccguuaggccgaaagagguag

SEQ ID NO: 7150 - RNA, 38 nt, Artificial Sequence
  Description of Artificial Sequence:  Enzymatic Nucleic Acid
ccaggggacugaugaggccguuaggccgaaaggagagg

SEQ ID NO: 7151 - RNA, 38 nt, Artificial Sequence
  Description of Artificial Sequence:  Enzymatic Nucleic Acid
ggccagggcugaugaggccguuaggccgaaagaggaga

SEQ ID NO: 7152 - RNA, 38 nt, Artificial Sequence
  Description of Artificial Sequence:  Enzymatic Nucleic Acid
gacagcagcugaugaggccguuaggccgaaagucaggu

SEQ ID NO: 7153 - RNA, 38 nt, Artificial Sequence
  Description of Artificial Sequence:  Enzymatic Nucleic Acid
ggacagcacugaugaggccguuaggccgaaaagucagg

SEQ ID NO: 7154 - RNA, 38 nt, Artificial Sequence
  Description of Artificial Sequence:  Enzymatic Nucleic Acid
gcacuuggcugaugaggccguuaggccgaaacagcaga

SEQ ID NO: 7155 - RNA, 38 nt, Artificial Sequence
  Description of Artificial Sequence:  Enzymatic Nucleic Acid
gggccugacugaugaggccguuaggccgaaacuggcac

SEQ ID NO: 7156 - RNA, 38 nt, Artificial Sequence
  Description of Artificial Sequence:  Enzymatic Nucleic Acid
aggggccucugaugaggccguuaggccgaaauacuggc

SEQ ID NO: 7157 - RNA, 38 nt, Artificial Sequence
  Description of Artificial Sequence:  Enzymatic Nucleic Acid
gguguccacugaugaggccguuaggccgaaaucagggg

SEQ ID NO: 7158 - RNA, 38 nt, Artificial Sequence
  Description of Artificial Sequence:  Enzymatic Nucleic Acid
augacaugcugaugaggccguuaggccgaaaucugcag

SEQ ID NO: 7159 - RNA, 38 nt, Artificial Sequence
  Description of Artificial Sequence:  Enzymatic Nucleic Acid
cacuccaucugaugaggccguuaggccgaaacauguau

SEQ ID NO: 7160 - RNA, 38 nt, Artificial Sequence
  Description of Artificial Sequence:  Enzymatic Nucleic Acid
cccuacuccugaugaggccguuaggccgaaaugcacuc

SEQ ID NO: 7161 - RNA, 38 nt, Artificial Sequence
  Description of Artificial Sequence:  Enzymatic Nucleic Acid
gccggccccugaugaggccguuaggccgaaacucaaug

SEQ ID NO: 7162 - RNA, 38 nt, Artificial Sequence
  Description of Artificial Sequence:  Enzymatic Nucleic Acid
aaagcgcacugaugaggccguuaggccgaaacugcacg

SEQ ID NO: 7163 - RNA, 38 nt, Artificial Sequence
  Description of Artificial Sequence:  Enzymatic Nucleic Acid
ggagaggacugaugaggccguuaggccgaaagcgcaga

SEQ ID NO: 7164 - RNA, 38 nt, Artificial Sequence
  Description of Artificial Sequence:  Enzymatic Nucleic Acid
gggagaggcugaugaggccguuaggccgaaaagcgcag

SEQ ID NO: 7165 - RNA, 38 nt, Artificial Sequence
  Description of Artificial Sequence:  Enzymatic Nucleic Acid
cgggagagcugaugaggccguuaggccgaaaaagcgca

SEQ ID NO: 7166 - RNA, 38 nt, Artificial Sequence
  Description of Artificial Sequence:  Enzymatic Nucleic Acid
aggcgggacugaugaggccguuaggccgaaaggaaagc

SEQ ID NO: 7167 - RNA, 38 nt, Artificial Sequence
  Description of Artificial Sequence:  Enzymatic Nucleic Acid
gcaggcggcugaugaggccguuaggccgaaagaggaaa

SEQ ID NO: 7168 - RNA, 38 nt, Artificial Sequence
  Description of Artificial Sequence:  Enzymatic Nucleic Acid
uccugggccugaugaggccguuaggccgaaaggcaggc

SEQ ID NO: 7169 - RNA, 38 nt, Artificial Sequence
  Description of Artificial Sequence:  Enzymatic Nucleic Acid
ugaagcgucugaugaggccguuaggccgaaaggugccg

SEQ ID NO: 7170 - RNA, 38 nt, Artificial Sequence
  Description of Artificial Sequence:  Enzymatic Nucleic Acid
cugaagcgcugaugaggccguuaggccgaaaaggugcc

SEQ ID NO: 7171 - RNA, 38 nt, Artificial Sequence
  Description of Artificial Sequence:  Enzymatic Nucleic Acid
aacagcugcugaugaggccguuaggccgaaagcguaag

SEQ ID NO: 7172 - RNA, 38 nt, Artificial Sequence
  Description of Artificial Sequence:  Enzymatic Nucleic Acid
caacagcucugaugaggccguuaggccgaaaagcguaa

SEQ ID NO: 7173 - RNA, 38 nt, Artificial Sequence
  Description of Artificial Sequence:  Enzymatic Nucleic Acid
agcggauccugaugaggccguuaggccgaaacagcuga

SEQ ID NO: 7174 - RNA, 38 nt, Artificial Sequence
  Description of Artificial Sequence:  Enzymatic Nucleic Acid
gaccagcgcugaugaggccguuaggccgaaaucaacag

SEQ ID NO: 7175 - RNA, 38 nt, Artificial Sequence
  Description of Artificial Sequence:  Enzymatic Nucleic Acid
aaagagggcugaugaggccguuaggccgaaaccagcgg

SEQ ID NO: 7176 - RNA, 38 nt, Artificial Sequence
  Description of Artificial Sequence:  Enzymatic Nucleic Acid
ccccaaaacugaugaggccguuaggccgaaaggggacc

SEQ ID NO: 7177 - RNA, 38 nt, Artificial Sequence
  Description of Artificial Sequence:  Enzymatic Nucleic Acid
uaccccaacugaugaggccguuaggccgaaagagggga

SEQ ID NO: 7178 - RNA, 38 nt, Artificial Sequence
  Description of Artificial Sequence:  Enzymatic Nucleic Acid
cuaccccacugaugaggccguuaggccgaaaagagggg

SEQ ID NO: 7179 - RNA, 38 nt, Artificial Sequence
  Description of Artificial Sequence:  Enzymatic Nucleic Acid
ucuacccccugaugaggccguuaggccgaaaaagaggg

SEQ ID NO: 7180 - RNA, 38 nt, Artificial Sequence
  Description of Artificial Sequence:  Enzymatic Nucleic Acid
gccgcauccugaugaggccguuaggccgaaaccccaaa

SEQ ID NO: 7181 - RNA, 38 nt, Artificial Sequence
  Description of Artificial Sequence:  Enzymatic Nucleic Acid
ucaggccucugaugaggccguuaggccgaaaucggggc

SEQ ID NO: 7182 - RNA, 38 nt, Artificial Sequence
  Description of Artificial Sequence:  Enzymatic Nucleic Acid
agagcagccugaugaggccguuaggccgaaagucaggc

SEQ ID NO: 7183 - RNA, 38 nt, Artificial Sequence
  Description of Artificial Sequence:  Enzymatic Nucleic Acid
aacaaaaacugaugaggccguuaggccgaaagcagcga

SEQ ID NO: 7184 - RNA, 38 nt, Artificial Sequence
  Description of Artificial Sequence:  Enzymatic Nucleic Acid
ggaacaaacugaugaggccguuaggccgaaagagcagc

SEQ ID NO: 7185 - RNA, 38 nt, Artificial Sequence
  Description of Artificial Sequence:  Enzymatic Nucleic Acid
gggaacaacugaugaggccguuaggccgaaaagagcag

SEQ ID NO: 7186 - RNA, 38 nt, Artificial Sequence
  Description of Artificial Sequence:  Enzymatic Nucleic Acid
agggaacacugaugaggccguuaggccgaaaaagagca

SEQ ID NO: 7187 - RNA, 38 nt, Artificial Sequence
  Description of Artificial Sequence:  Enzymatic Nucleic Acid
aagggaaccugaugaggccguuaggccgaaaaaagagc

SEQ ID NO: 7188 - RNA, 38 nt, Artificial Sequence
  Description of Artificial Sequence:  Enzymatic Nucleic Acid
cagaagggcugaugaggccguuaggccgaaacaaaaag

SEQ ID NO: 7189 - RNA, 38 nt, Artificial Sequence
  Description of Artificial Sequence:  Enzymatic Nucleic Acid
acagaaggcugaugaggccguuaggccgaaaacaaaaa

SEQ ID NO: 7190 - RNA, 38 nt, Artificial Sequence
  Description of Artificial Sequence:  Enzymatic Nucleic Acid
gcagacagcugaugaggccguuaggccgaaagggaaca

SEQ ID NO: 7191 - RNA, 38 nt, Artificial Sequence
  Description of Artificial Sequence:  Enzymatic Nucleic Acid
agcagacacugaugaggccguuaggccgaaaagggaac

SEQ ID NO: 7192 - RNA, 38 nt, Artificial Sequence
  Description of Artificial Sequence:  Enzymatic Nucleic Acid
uucgagcacugaugaggccguuaggccgaaacagaagg

SEQ ID NO: 7193 - RNA, 38 nt, Artificial Sequence
  Description of Artificial Sequence:  Enzymatic Nucleic Acid
agugguuccugaugaggccguuaggccgaaagcagaca

SEQ ID NO: 7194 - RNA, 38 nt, Artificial Sequence
  Description of Artificial Sequence:  Enzymatic Nucleic Acid
cccgaggccugaugaggccguuaggccgaaagugguuc

SEQ ID NO: 7195 - RNA, 38 nt, Artificial Sequence
  Description of Artificial Sequence:  Enzymatic Nucleic Acid
auuagccccugaugaggccguuaggccgaaaggcaagu

SEQ ID NO: 7196 - RNA, 38 nt, Artificial Sequence
  Description of Artificial Sequence:  Enzymatic Nucleic Acid
ggagggaucugaugaggccguuaggccgaaagcccgag

SEQ ID NO: 7197 - RNA, 38 nt, Artificial Sequence
  Description of Artificial Sequence:  Enzymatic Nucleic Acid
gagggaggcugaugaggccguuaggccgaaauuagccc

SEQ ID NO: 7198 - RNA, 38 nt, Artificial Sequence
  Description of Artificial Sequence:  Enzymatic Nucleic Acid
ggaagaggcugaugaggccguuaggccgaaagggauua

SEQ ID NO: 7199 - RNA, 38 nt, Artificial Sequence
  Description of Artificial Sequence:  Enzymatic Nucleic Acid
uggaggaacugaugaggccguuaggccgaaagggaggg

SEQ ID NO: 7200 - RNA, 38 nt, Artificial Sequence
  Description of Artificial Sequence:  Enzymatic Nucleic Acid
gguggaggcugaugaggccguuaggccgaaagagggag

SEQ ID NO: 7201 - RNA, 38 nt, Artificial Sequence
  Description of Artificial Sequence:  Enzymatic Nucleic Acid
ggguggagcugaugaggccguuaggccgaaaagaggga

SEQ ID NO: 7202 - RNA, 38 nt, Artificial Sequence
  Description of Artificial Sequence:  Enzymatic Nucleic Acid
gccgggugcugaugaggccguuaggccgaaaggaagag

SEQ ID NO: 7203 - RNA, 38 nt, Artificial Sequence
  Description of Artificial Sequence:  Enzymatic Nucleic Acid
ccauucuucugaugaggccguuaggccgaaacuucccc

SEQ ID NO: 7204 - RNA, 38 nt, Artificial Sequence
  Description of Artificial Sequence:  Enzymatic Nucleic Acid
cucccugacugaugaggccguuaggccgaaagccccag

SEQ ID NO: 7205 - RNA, 38 nt, Artificial Sequence
  Description of Artificial Sequence:  Enzymatic Nucleic Acid
uucucccucugaugaggccguuaggccgaaagagcccc

SEQ ID NO: 7206 - RNA, 38 nt, Artificial Sequence
  Description of Artificial Sequence:  Enzymatic Nucleic Acid
gccaggggcugaugaggccguuaggccgaaagcaguuc

SEQ ID NO: 7207 - RNA, 38 nt, Artificial Sequence
  Description of Artificial Sequence:  Enzymatic Nucleic Acid
ugccagggcugaugaggccguuaggccgaaaagcaguu

SEQ ID NO: 7208 - RNA, 38 nt, Artificial Sequence
  Description of Artificial Sequence:  Enzymatic Nucleic Acid
gggaggaacugaugaggccguuaggccgaaagcugcca

SEQ ID NO: 7209 - RNA, 38 nt, Artificial Sequence
  Description of Artificial Sequence:  Enzymatic Nucleic Acid
gugggaggcugaugaggccguuaggccgaaagagcugc

SEQ ID NO: 7210 - RNA, 38 nt, Artificial Sequence
  Description of Artificial Sequence:  Enzymatic Nucleic Acid
ggugggagcugaugaggccguuaggccgaaaagagcug

SEQ ID NO: 7211 - RNA, 38 nt, Artificial Sequence
  Description of Artificial Sequence:  Enzymatic Nucleic Acid
uccgguggcugaugaggccguuaggccgaaaggaagag

SEQ ID NO: 7212 - RNA, 38 nt, Artificial Sequence
  Description of Artificial Sequence:  Enzymatic Nucleic Acid
caugguaacugaugaggccguuaggccgaaagggcagc

SEQ ID NO: 7213 - RNA, 38 nt, Artificial Sequence
  Description of Artificial Sequence:  Enzymatic Nucleic Acid
ugcauggucugaugaggccguuaggccgaaagagggca

SEQ ID NO: 7214 - RNA, 38 nt, Artificial Sequence
  Description of Artificial Sequence:  Enzymatic Nucleic Acid
gugcauggcugaugaggccguuaggccgaaaagagggc

SEQ ID NO: 7215 - RNA, 38 nt, Artificial Sequence
  Description of Artificial Sequence:  Enzymatic Nucleic Acid
caaaaggacugaugaggccguuaggccgaaagcacccg

SEQ ID NO: 7216 - RNA, 38 nt, Artificial Sequence
  Description of Artificial Sequence:  Enzymatic Nucleic Acid
cccaaaagcugaugaggccguuaggccgaaagagcacc

SEQ ID NO: 7217 - RNA, 38 nt, Artificial Sequence
  Description of Artificial Sequence:  Enzymatic Nucleic Acid
cagcccaacugaugaggccguuaggccgaaaggagagc

SEQ ID NO: 7218 - RNA, 38 nt, Artificial Sequence
  Description of Artificial Sequence:  Enzymatic Nucleic Acid
gcagcccacugaugaggccguuaggccgaaaaggagag

SEQ ID NO: 7219 - RNA, 38 nt, Artificial Sequence
  Description of Artificial Sequence:  Enzymatic Nucleic Acid
ugcagccccugaugaggccguuaggccgaaaaaggaga

SEQ ID NO: 7220 - RNA, 38 nt, Artificial Sequence
  Description of Artificial Sequence:  Enzymatic Nucleic Acid
aaauggaacugaugaggccguuaggccgaaagcaugca

SEQ ID NO: 7221 - RNA, 38 nt, Artificial Sequence
  Description of Artificial Sequence:  Enzymatic Nucleic Acid
caaaauggcugaugaggccguuaggccgaaauagcaug

SEQ ID NO: 7222 - RNA, 38 nt, Artificial Sequence
  Description of Artificial Sequence:  Enzymatic Nucleic Acid
gcaaaaugcugaugaggccguuaggccgaaaauagcau

SEQ ID NO: 7223 - RNA, 38 nt, Artificial Sequence
  Description of Artificial Sequence:  Enzymatic Nucleic Acid
ggcugcaacugaugaggccguuaggccgaaauggaaua

SEQ ID NO: 7224 - RNA, 38 nt, Artificial Sequence
  Description of Artificial Sequence:  Enzymatic Nucleic Acid
uggcugcacugaugaggccguuaggccgaaaauggaau

SEQ ID NO: 7225 - RNA, 38 nt, Artificial Sequence
  Description of Artificial Sequence:  Enzymatic Nucleic Acid
cuggcugccugaugaggccguuaggccgaaaaauggaa

SEQ ID NO: 7226 - RNA, 38 nt, Artificial Sequence
  Description of Artificial Sequence:  Enzymatic Nucleic Acid
ugguuaaacugaugaggccguuaggccgaaacacaucg

SEQ ID NO: 7227 - RNA, 38 nt, Artificial Sequence
  Description of Artificial Sequence:  Enzymatic Nucleic Acid
acugguuacugaugaggccguuaggccgaaauacacau

SEQ ID NO: 7228 - RNA, 38 nt, Artificial Sequence
  Description of Artificial Sequence:  Enzymatic Nucleic Acid
gacugguucugaugaggccguuaggccgaaaauacaca

SEQ ID NO: 7229 - RNA, 38 nt, Artificial Sequence
  Description of Artificial Sequence:  Enzymatic Nucleic Acid
ugacuggucugaugaggccguuaggccgaaaaauacac

SEQ ID NO: 7230 - RNA, 38 nt, Artificial Sequence
  Description of Artificial Sequence:  Enzymatic Nucleic Acid
ucaauagucugaugaggccguuaggccgaaacugguua

SEQ ID NO: 7231 - RNA, 38 nt, Artificial Sequence
  Description of Artificial Sequence:  Enzymatic Nucleic Acid
uccaucaacugaugaggccguuaggccgaaagugacug

SEQ ID NO: 7232 - RNA, 38 nt, Artificial Sequence
  Description of Artificial Sequence:  Enzymatic Nucleic Acid
uguccauccugaugaggccguuaggccgaaauagugac

SEQ ID NO: 7233 - RNA, 38 nt, Artificial Sequence
  Description of Artificial Sequence:  Enzymatic Nucleic Acid
acaacccacugaugaggccguuaggccgaaauguccau

SEQ ID NO: 7234 - RNA, 38 nt, Artificial Sequence
  Description of Artificial Sequence:  Enzymatic Nucleic Acid
aacaaccccugaugaggccguuaggccgaaaaugucca

SEQ ID NO: 7235 - RNA, 38 nt, Artificial Sequence
  Description of Artificial Sequence:  Enzymatic Nucleic Acid
ugggaaaccugaugaggccguuaggccgaaacccaaau

SEQ ID NO: 7236 - RNA, 38 nt, Artificial Sequence
  Description of Artificial Sequence:  Enzymatic Nucleic Acid
agaugggacugaugaggccguuaggccgaaacaaccca

SEQ ID NO: 7237 - RNA, 38 nt, Artificial Sequence
  Description of Artificial Sequence:  Enzymatic Nucleic Acid
aagaugggcugaugaggccguuaggccgaaaacaaccc

SEQ ID NO: 7238 - RNA, 38 nt, Artificial Sequence
  Description of Artificial Sequence:  Enzymatic Nucleic Acid
aaagauggcugaugaggccguuaggccgaaaaacaacc

SEQ ID NO: 7239 - RNA, 38 nt, Artificial Sequence
  Description of Artificial Sequence:  Enzymatic Nucleic Acid
aacaaaaacugaugaggccguuaggccgaaaugggaaa

SEQ ID NO: 7240 - RNA, 38 nt, Artificial Sequence
  Description of Artificial Sequence:  Enzymatic Nucleic Acid
guaacaaacugaugaggccguuaggccgaaagauggga

SEQ ID NO: 7241 - RNA, 38 nt, Artificial Sequence
  Description of Artificial Sequence:  Enzymatic Nucleic Acid
gguaacaacugaugaggccguuaggccgaaaagauggg

SEQ ID NO: 7242 - RNA, 38 nt, Artificial Sequence
  Description of Artificial Sequence:  Enzymatic Nucleic Acid
ugguaacacugaugaggccguuaggccgaaaaagaugg

SEQ ID NO: 7243 - RNA, 38 nt, Artificial Sequence
  Description of Artificial Sequence:  Enzymatic Nucleic Acid
augguaaccugaugaggccguuaggccgaaaaaagaug

SEQ ID NO: 7244 - RNA, 38 nt, Artificial Sequence
  Description of Artificial Sequence:  Enzymatic Nucleic Acid
uuuauggucugaugaggccguuaggccgaaacaaaaag

SEQ ID NO: 7245 - RNA, 38 nt, Artificial Sequence
  Description of Artificial Sequence:  Enzymatic Nucleic Acid
auuuauggcugaugaggccguuaggccgaaaacaaaaa

SEQ ID NO: 7246 - RNA, 38 nt, Artificial Sequence
  Description of Artificial Sequence:  Enzymatic Nucleic Acid
ccauuauucugaugaggccguuaggccgaaaugguaac

SEQ ID NO: 7247 - RNA, 38 nt, Artificial Sequence
  Description of Artificial Sequence:  Enzymatic Nucleic Acid
uaugccaucugaugaggccguuaggccgaaauuuaugg

SEQ ID NO: 7248 - RNA, 38 nt, Artificial Sequence
  Description of Artificial Sequence:  Enzymatic Nucleic Acid
uuuuuuaccugaugaggccguuaggccgaaaugccauu

SEQ ID NO: 7249 - RNA, 38 nt, Artificial Sequence
  Description of Artificial Sequence:  Enzymatic Nucleic Acid
uuuuuuuucugaugaggccguuaggccgaaacuaugcc

SEQ ID NO: 7250 - RNA, 38 nt, Artificial Sequence
  Description of Artificial Sequence:  Enzymatic Nucleic Acid
  misc_feature (31)..(31): n stands for inosine
aagggccacugaugaggccguuaggccgaancucgugc

SEQ ID NO: 7251 - RNA, 38 nt, Artificial Sequence
  Description of Artificial Sequence:  Enzymatic Nucleic Acid
  misc_feature (31)..(31): n stands for inosine
aucacaagcugaugaggccguuaggccgaanccaugcu

SEQ ID NO: 7252 - RNA, 38 nt, Artificial Sequence
  Description of Artificial Sequence:  Enzymatic Nucleic Acid
  misc_feature (31)..(31): n stands for inosine
gaucacaacugaugaggccguuaggccgaangccaugc

SEQ ID NO: 7253 - RNA, 38 nt, Artificial Sequence
  Description of Artificial Sequence:  Enzymatic Nucleic Acid
  misc_feature (31)..(31): n stands for inosine
ggaucacacugaugaggccguuaggccgaanggccaug

SEQ ID NO: 7254 - RNA, 38 nt, Artificial Sequence
  Description of Artificial Sequence:  Enzymatic Nucleic Acid
  misc_feature (31)..(31): n stands for inosine
ccccaccucugaugaggccguuaggccgaanaucacaa

SEQ ID NO: 7255 - RNA, 38 nt, Artificial Sequence
  Description of Artificial Sequence:  Enzymatic Nucleic Acid
  misc_feature (31)..(31): n stands for inosine
uccccacccugaugaggccguuaggccgaangaucaca

SEQ ID NO: 7256 - RNA, 38 nt, Artificial Sequence
  Description of Artificial Sequence:  Enzymatic Nucleic Acid
  misc_feature (31)..(31): n stands for inosine
ugggccuucugaugaggccguuaggccgaanuuucccc

SEQ ID NO: 7257 - RNA, 38 nt, Artificial Sequence
  Description of Artificial Sequence:  Enzymatic Nucleic Acid
  misc_feature (31)..(31): n stands for inosine
cuucucugcugaugaggccguuaggccgaanccuuagu

SEQ ID NO: 7258 - RNA, 38 nt, Artificial Sequence
  Description of Artificial Sequence:  Enzymatic Nucleic Acid
  misc_feature (31)..(31): n stands for inosine
acuucucucugaugaggccguuaggccgaangccuuag

SEQ ID NO: 7259 - RNA, 38 nt, Artificial Sequence
  Description of Artificial Sequence:  Enzymatic Nucleic Acid
  misc_feature (31)..(31): n stands for inosine
cacuucuccugaugaggccguuaggccgaanggccuua

SEQ ID NO: 7260 - RNA, 38 nt, Artificial Sequence
  Description of Artificial Sequence:  Enzymatic Nucleic Acid
  misc_feature (31)..(31): n stands for inosine
gucugcggcugaugaggccguuaggccgaanuccucac

SEQ ID NO: 7261 - RNA, 38 nt, Artificial Sequence
  Description of Artificial Sequence:  Enzymatic Nucleic Acid
  misc_feature (31)..(31): n stands for inosine
agucugcgcugaugaggccguuaggccgaanguccuca

SEQ ID NO: 7262 - RNA, 38 nt, Artificial Sequence
  Description of Artificial Sequence:  Enzymatic Nucleic Acid
  misc_feature (31)..(31): n stands for inosine
uagucugccugaugaggccguuaggccgaangguccuc

SEQ ID NO: 7263 - RNA, 38 nt, Artificial Sequence
  Description of Artificial Sequence:  Enzymatic Nucleic Acid
  misc_feature (31)..(31): n stands for inosine
ugauaguccugaugaggccguuaggccgaancgggguc

SEQ ID NO: 7264 - RNA, 38 nt, Artificial Sequence
  Description of Artificial Sequence:  Enzymatic Nucleic Acid
  misc_feature (31)..(31): n stands for inosine
ggauugaucugaugaggccguuaggccgaanucugcgg

SEQ ID NO: 7265 - RNA, 38 nt, Artificial Sequence
  Description of Artificial Sequence:  Enzymatic Nucleic Acid
  misc_feature (31)..(31): n stands for inosine
acugggaucugaugaggccguuaggccgaanauagucu

SEQ ID NO: 7266 - RNA, 38 nt, Artificial Sequence
  Description of Artificial Sequence:  Enzymatic Nucleic Acid
  misc_feature (31)..(31): n stands for inosine
agagacugcugaugaggccguuaggccgaanauugaua

SEQ ID NO: 7267 - RNA, 38 nt, Artificial Sequence
  Description of Artificial Sequence:  Enzymatic Nucleic Acid
  misc_feature (31)..(31): n stands for inosine
aagagacucugaugaggccguuaggccgaangauugau

SEQ ID NO: 7268 - RNA, 38 nt, Artificial Sequence
  Description of Artificial Sequence:  Enzymatic Nucleic Acid
  misc_feature (31)..(31): n stands for inosine
gaagagaccugaugaggccguuaggccgaanggauuga

SEQ ID NO: 7269 - RNA, 38 nt, Artificial Sequence
  Description of Artificial Sequence:  Enzymatic Nucleic Acid
  misc_feature (31)..(31): n stands for inosine
aggggaagcugaugaggccguuaggccgaanacuggga

SEQ ID NO: 7270 - RNA, 38 nt, Artificial Sequence
  Description of Artificial Sequence:  Enzymatic Nucleic Acid
  misc_feature (31)..(31): n stands for inosine
ugaggggacugaugaggccguuaggccgaanagacugg

SEQ ID NO: 7271 - RNA, 38 nt, Artificial Sequence
  Description of Artificial Sequence:  Enzymatic Nucleic Acid
  misc_feature (31)..(31): n stands for inosine
gagugaggcugaugaggccguuaggccgaanaagagac

SEQ ID NO: 7272 - RNA, 38 nt, Artificial Sequence
  Description of Artificial Sequence:  Enzymatic Nucleic Acid
  misc_feature (31)..(31): n stands for inosine
ggagugagcugaugaggccguuaggccgaangaagaga

SEQ ID NO: 7273 - RNA, 38 nt, Artificial Sequence
  Description of Artificial Sequence:  Enzymatic Nucleic Acid
  misc_feature (31)..(31): n stands for inosine
gggagugacugaugaggccguuaggccgaanggaagag

SEQ ID NO: 7274 - RNA, 38 nt, Artificial Sequence
  Description of Artificial Sequence:  Enzymatic Nucleic Acid
  misc_feature (31)..(31): n stands for inosine
agggagugcugaugaggccguuaggccgaangggaaga

SEQ ID NO: 7275 - RNA, 38 nt, Artificial Sequence
  Description of Artificial Sequence:  Enzymatic Nucleic Acid
  misc_feature (31)..(31): n stands for inosine
acagggagcugaugaggccguuaggccgaanaggggaa

SEQ ID NO: 7276 - RNA, 38 nt, Artificial Sequence
  Description of Artificial Sequence:  Enzymatic Nucleic Acid
  misc_feature (31)..(31): n stands for inosine
ucacagggcugaugaggccguuaggccgaanugagggg

SEQ ID NO: 7277 - RNA, 38 nt, Artificial Sequence
  Description of Artificial Sequence:  Enzymatic Nucleic Acid
  misc_feature (31)..(31): n stands for inosine
cuucacagcugaugaggccguuaggccgaanagugagg

SEQ ID NO: 7278 - RNA, 38 nt, Artificial Sequence
  Description of Artificial Sequence:  Enzymatic Nucleic Acid
  misc_feature (31)..(31): n stands for inosine
gcuucacacugaugaggccguuaggccgaangagugag

SEQ ID NO: 7279 - RNA, 38 nt, Artificial Sequence
  Description of Artificial Sequence:  Enzymatic Nucleic Acid
  misc_feature (31)..(31): n stands for inosine
agcuucaccugaugaggccguuaggccgaanggaguga

SEQ ID NO: 7280 - RNA, 38 nt, Artificial Sequence
  Description of Artificial Sequence:  Enzymatic Nucleic Acid
  misc_feature (31)..(31): n stands for inosine
ugcuggagcugaugaggccguuaggccgaancuucaca

SEQ ID NO: 7281 - RNA, 38 nt, Artificial Sequence
  Description of Artificial Sequence:  Enzymatic Nucleic Acid
  misc_feature (31)..(31): n stands for inosine
gaugcuggcugaugaggccguuaggccgaanagcuuca

SEQ ID NO: 7282 - RNA, 38 nt, Artificial Sequence
  Description of Artificial Sequence:  Enzymatic Nucleic Acid
  misc_feature (31)..(31): n stands for inosine
augaugcucugaugaggccguuaggccgaanagagcuu

SEQ ID NO: 7283 - RNA, 38 nt, Artificial Sequence
  Description of Artificial Sequence:  Enzymatic Nucleic Acid
  misc_feature (31)..(31): n stands for inosine
gaugaugccugaugaggccguuaggccgaangagagcu

SEQ ID NO: 7284 - RNA, 38 nt, Artificial Sequence
  Description of Artificial Sequence:  Enzymatic Nucleic Acid
  misc_feature (31)..(31): n stands for inosine
cucgaugacugaugaggccguuaggccgaancuggaga

SEQ ID NO: 7285 - RNA, 38 nt, Artificial Sequence
  Description of Artificial Sequence:  Enzymatic Nucleic Acid
  misc_feature (31)..(31): n stands for inosine
gaccucgacugaugaggccguuaggccgaanaugcugg

SEQ ID NO: 7286 - RNA, 38 nt, Artificial Sequence
  Description of Artificial Sequence:  Enzymatic Nucleic Acid
  misc_feature (31)..(31): n stands for inosine
ggcugaugcugaugaggccguuaggccgaanaccucga

SEQ ID NO: 7287 - RNA, 38 nt, Artificial Sequence
  Description of Artificial Sequence:  Enzymatic Nucleic Acid
  misc_feature (31)..(31): n stands for inosine
gggcugaucugaugaggccguuaggccgaangaccucg

SEQ ID NO: 7288 - RNA, 38 nt, Artificial Sequence
  Description of Artificial Sequence:  Enzymatic Nucleic Acid
  misc_feature (31)..(31): n stands for inosine
agggcugacugaugaggccguuaggccgaanggaccuc

SEQ ID NO: 7289 - RNA, 38 nt, Artificial Sequence
  Description of Artificial Sequence:  Enzymatic Nucleic Acid
  misc_feature (31)..(31): n stands for inosine
gcaagggccugaugaggccguuaggccgaanaugggac

SEQ ID NO: 7290 - RNA, 38 nt, Artificial Sequence
  Description of Artificial Sequence:  Enzymatic Nucleic Acid
  misc_feature (31)..(31): n stands for inosine
agggcaagcugaugaggccguuaggccgaancugaugg

SEQ ID NO: 7291 - RNA, 38 nt, Artificial Sequence
  Description of Artificial Sequence:  Enzymatic Nucleic Acid
  misc_feature (31)..(31): n stands for inosine
cagggcaacugaugaggccguuaggccgaangcugaug

SEQ ID NO: 7292 - RNA, 38 nt, Artificial Sequence
  Description of Artificial Sequence:  Enzymatic Nucleic Acid
  misc_feature (31)..(31): n stands for inosine
acagggcacugaugaggccguuaggccgaanggcugau

SEQ ID NO: 7293 - RNA, 38 nt, Artificial Sequence
  Description of Artificial Sequence:  Enzymatic Nucleic Acid
  misc_feature (31)..(31): n stands for inosine
uccaacagcugaugaggccguuaggccgaancaagggc

SEQ ID NO: 7294 - RNA, 38 nt, Artificial Sequence
  Description of Artificial Sequence:  Enzymatic Nucleic Acid
  misc_feature (31)..(31): n stands for inosine
auccaacacugaugaggccguuaggccgaangcaaggg

SEQ ID NO: 7295 - RNA, 38 nt, Artificial Sequence
  Description of Artificial Sequence:  Enzymatic Nucleic Acid
  misc_feature (31)..(31): n stands for inosine
cauccaaccugaugaggccguuaggccgaanggcaagg

SEQ ID NO: 7296 - RNA, 38 nt, Artificial Sequence
  Description of Artificial Sequence:  Enzymatic Nucleic Acid
  misc_feature (31)..(31): n stands for inosine
uccagaggcugaugaggccguuaggccgaanccuauuc

SEQ ID NO: 7297 - RNA, 38 nt, Artificial Sequence
  Description of Artificial Sequence:  Enzymatic Nucleic Acid
  misc_feature (31)..(31): n stands for inosine
cuuccagacugaugaggccguuaggccgaanugccuau

SEQ ID NO: 7298 - RNA, 38 nt, Artificial Sequence
  Description of Artificial Sequence:  Enzymatic Nucleic Acid
  misc_feature (31)..(31): n stands for inosine
ucuuccagcugaugaggccguuaggccgaangugccua

SEQ ID NO: 7299 - RNA, 38 nt, Artificial Sequence
  Description of Artificial Sequence:  Enzymatic Nucleic Acid
  misc_feature (31)..(31): n stands for inosine
gcucuucccugaugaggccguuaggccgaanaggugcc

SEQ ID NO: 7300 - RNA, 38 nt, Artificial Sequence
  Description of Artificial Sequence:  Enzymatic Nucleic Acid
  misc_feature (31)..(31): n stands for inosine
acacaguucugaugaggccguuaggccgaancucuucc

SEQ ID NO: 7301 - RNA, 38 nt, Artificial Sequence
  Description of Artificial Sequence:  Enzymatic Nucleic Acid
  misc_feature (31)..(31): n stands for inosine
cacacagucugaugaggccguuaggccgaangcucuuc

SEQ ID NO: 7302 - RNA, 38 nt, Artificial Sequence
  Description of Artificial Sequence:  Enzymatic Nucleic Acid
  misc_feature (31)..(31): n stands for inosine
ucucacaccugaugaggccguuaggccgaanuuggcuc

SEQ ID NO: 7303 - RNA, 38 nt, Artificial Sequence
  Description of Artificial Sequence:  Enzymatic Nucleic Acid
  misc_feature (31)..(31): n stands for inosine
cacugggccugaugaggccguuaggccgaancaccauc

SEQ ID NO: 7304 - RNA, 38 nt, Artificial Sequence
  Description of Artificial Sequence:  Enzymatic Nucleic Acid
  misc_feature (31)..(31): n stands for inosine
caccacugcugaugaggccguuaggccgaancugcacc

SEQ ID NO: 7305 - RNA, 38 nt, Artificial Sequence
  Description of Artificial Sequence:  Enzymatic Nucleic Acid
  misc_feature (31)..(31): n stands for inosine
ccaccacucugaugaggccguuaggccgaangcugcac

SEQ ID NO: 7306 - RNA, 38 nt, Artificial Sequence
  Description of Artificial Sequence:  Enzymatic Nucleic Acid
  misc_feature (31)..(31): n stands for inosine
gccaccaccugaugaggccguuaggccgaanggcugca

SEQ ID NO: 7307 - RNA, 38 nt, Artificial Sequence
  Description of Artificial Sequence:  Enzymatic Nucleic Acid
  misc_feature (31)..(31): n stands for inosine
ugcugccgcugaugaggccguuaggccgaanccaccac

SEQ ID NO: 7308 - RNA, 38 nt, Artificial Sequence
  Description of Artificial Sequence:  Enzymatic Nucleic Acid
  misc_feature (31)..(31): n stands for inosine
cugcugcccugaugaggccguuaggccgaangccacca

SEQ ID NO: 7309 - RNA, 38 nt, Artificial Sequence
  Description of Artificial Sequence:  Enzymatic Nucleic Acid
  misc_feature (31)..(31): n stands for inosine
ugaucugccugaugaggccguuaggccgaanccgggcc

SEQ ID NO: 7310 - RNA, 38 nt, Artificial Sequence
  Description of Artificial Sequence:  Enzymatic Nucleic Acid
  misc_feature (31)..(31): n stands for inosine
uccugauccugaugaggccguuaggccgaancugccgg

SEQ ID NO: 7311 - RNA, 38 nt, Artificial Sequence
  Description of Artificial Sequence:  Enzymatic Nucleic Acid
  misc_feature (31)..(31): n stands for inosine
guacgucccugaugaggccguuaggccgaanaucugcu

SEQ ID NO: 7312 - RNA, 38 nt, Artificial Sequence
  Description of Artificial Sequence:  Enzymatic Nucleic Acid
  misc_feature (31)..(31): n stands for inosine
cuucgccccugaugaggccguuaggccgaanuacgucc

SEQ ID NO: 7313 - RNA, 38 nt, Artificial Sequence
  Description of Artificial Sequence:  Enzymatic Nucleic Acid
  misc_feature (31)..(31): n stands for inosine
cccagaggcugaugaggccguuaggccgaanacucuuc

SEQ ID NO: 7314 - RNA, 38 nt, Artificial Sequence
  Description of Artificial Sequence:  Enzymatic Nucleic Acid
  misc_feature (31)..(31): n stands for inosine
uccccagacugaugaggccguuaggccgaanagacucu

SEQ ID NO: 7315 - RNA, 38 nt, Artificial Sequence
  Description of Artificial Sequence:  Enzymatic Nucleic Acid
  misc_feature (31)..(31): n stands for inosine
uuccccagcugaugaggccguuaggccgaangagacuc

SEQ ID NO: 7316 - RNA, 38 nt, Artificial Sequence
  Description of Artificial Sequence:  Enzymatic Nucleic Acid
  misc_feature (31)..(31): n stands for inosine
gcuucccccugaugaggccguuaggccgaanaggagac

SEQ ID NO: 7317 - RNA, 38 nt, Artificial Sequence
  Description of Artificial Sequence:  Enzymatic Nucleic Acid
  misc_feature (31)..(31): n stands for inosine
gcauggcucugaugaggccguuaggccgaancuucccc

SEQ ID NO: 7318 - RNA, 38 nt, Artificial Sequence
  Description of Artificial Sequence:  Enzymatic Nucleic Acid
  misc_feature (31)..(31): n stands for inosine
agcauggccugaugaggccguuaggccgaangcuuccc

SEQ ID NO: 7319 - RNA, 38 nt, Artificial Sequence
  Description of Artificial Sequence:  Enzymatic Nucleic Acid
  misc_feature (31)..(31): n stands for inosine
ugcagcaucugaugaggccguuaggccgaancuggcuu

SEQ ID NO: 7320 - RNA, 38 nt, Artificial Sequence
  Description of Artificial Sequence:  Enzymatic Nucleic Acid
  misc_feature (31)..(31): n stands for inosine
gugcagcacugaugaggccguuaggccgaangcuggcu

SEQ ID NO: 7321 - RNA, 38 nt, Artificial Sequence
  Description of Artificial Sequence:  Enzymatic Nucleic Acid
  misc_feature (31)..(31): n stands for inosine
gcaggugccugaugaggccguuaggccgaancauggcu

SEQ ID NO: 7322 - RNA, 38 nt, Artificial Sequence
  Description of Artificial Sequence:  Enzymatic Nucleic Acid
  misc_feature (31)..(31): n stands for inosine
aaggcaggcugaugaggccguuaggccgaancagcaug

SEQ ID NO: 7323 - RNA, 38 nt, Artificial Sequence
  Description of Artificial Sequence:  Enzymatic Nucleic Acid
  misc_feature (31)..(31): n stands for inosine
ugaaggcacugaugaggccguuaggccgaanugcagca

SEQ ID NO: 7324 - RNA, 38 nt, Artificial Sequence
  Description of Artificial Sequence:  Enzymatic Nucleic Acid
  misc_feature (31)..(31): n stands for inosine
cugaaggccugaugaggccguuaggccgaangugcagc

SEQ ID NO: 7325 - RNA, 38 nt, Artificial Sequence
  Description of Artificial Sequence:  Enzymatic Nucleic Acid
  misc_feature (31)..(31): n stands for inosine
guucugaacugaugaggccguuaggccgaancaggugc

SEQ ID NO: 7326 - RNA, 38 nt, Artificial Sequence
  Description of Artificial Sequence:  Enzymatic Nucleic Acid
  misc_feature (31)..(31): n stands for inosine
uguucugacugaugaggccguuaggccgaangcaggug

SEQ ID NO: 7327 - RNA, 38 nt, Artificial Sequence
  Description of Artificial Sequence:  Enzymatic Nucleic Acid
  misc_feature (31)..(31): n stands for inosine
cccuguuccugaugaggccguuaggccgaanaaggcag

SEQ ID NO: 7328 - RNA, 38 nt, Artificial Sequence
  Description of Artificial Sequence:  Enzymatic Nucleic Acid
  misc_feature (31)..(31): n stands for inosine
gagcgccccugaugaggccguuaggccgaanuucugaa

SEQ ID NO: 7329 - RNA, 38 nt, Artificial Sequence
  Description of Artificial Sequence:  Enzymatic Nucleic Acid
  misc_feature (31)..(31): n stands for inosine
gucucaggcugaugaggccguuaggccgaancgcccug

SEQ ID NO: 7330 - RNA, 38 nt, Artificial Sequence
  Description of Artificial Sequence:  Enzymatic Nucleic Acid
  misc_feature (31)..(31): n stands for inosine
gggucucacugaugaggccguuaggccgaanagcgccc

SEQ ID NO: 7331 - RNA, 38 nt, Artificial Sequence
  Description of Artificial Sequence:  Enzymatic Nucleic Acid
  misc_feature (31)..(31): n stands for inosine
agggucuccugaugaggccguuaggccgaangagcgcc

SEQ ID NO: 7332 - RNA, 38 nt, Artificial Sequence
  Description of Artificial Sequence:  Enzymatic Nucleic Acid
  misc_feature (31)..(31): n stands for inosine
cgcuggagcugaugaggccguuaggccgaanucucagg

SEQ ID NO: 7333 - RNA, 38 nt, Artificial Sequence
  Description of Artificial Sequence:  Enzymatic Nucleic Acid
  misc_feature (31)..(31): n stands for inosine
gcgcuggacugaugaggccguuaggccgaangucucag

SEQ ID NO: 7334 - RNA, 38 nt, Artificial Sequence
  Description of Artificial Sequence:  Enzymatic Nucleic Acid
  misc_feature (31)..(31): n stands for inosine
agcgcuggcugaugaggccguuaggccgaanggucuca

SEQ ID NO: 7335 - RNA, 38 nt, Artificial Sequence
  Description of Artificial Sequence:  Enzymatic Nucleic Acid
  misc_feature (31)..(31): n stands for inosine
gcagcgcucugaugaggccguuaggccgaanagggucu

SEQ ID NO: 7336 - RNA, 38 nt, Artificial Sequence
  Description of Artificial Sequence:  Enzymatic Nucleic Acid
  misc_feature (31)..(31): n stands for inosine
ggcagcgccugaugaggccguuaggccgaangaggguc

SEQ ID NO: 7337 - RNA, 38 nt, Artificial Sequence
  Description of Artificial Sequence:  Enzymatic Nucleic Acid
  misc_feature (31)..(31): n stands for inosine
cuccaggccugaugaggccguuaggccgaancgcugga

SEQ ID NO: 7338 - RNA, 38 nt, Artificial Sequence
  Description of Artificial Sequence:  Enzymatic Nucleic Acid
  misc_feature (31)..(31): n stands for inosine
cuccuccacugaugaggccguuaggccgaancagcgcu

SEQ ID NO: 7339 - RNA, 38 nt, Artificial Sequence
  Description of Artificial Sequence:  Enzymatic Nucleic Acid
  misc_feature (31)..(31): n stands for inosine
ucuccucccugaugaggccguuaggccgaangcagcgc

SEQ ID NO: 7340 - RNA, 38 nt, Artificial Sequence
  Description of Artificial Sequence:  Enzymatic Nucleic Acid
  misc_feature (31)..(31): n stands for inosine
ggagcucucugaugaggccguuaggccgaanauucucc

SEQ ID NO: 7341 - RNA, 38 nt, Artificial Sequence
  Description of Artificial Sequence:  Enzymatic Nucleic Acid
  misc_feature (31)..(31): n stands for inosine
caucucggcugaugaggccguuaggccgaancucuuga

SEQ ID NO: 7342 - RNA, 38 nt, Artificial Sequence
  Description of Artificial Sequence:  Enzymatic Nucleic Acid
  misc_feature (31)..(31): n stands for inosine
ggcaucuccugaugaggccguuaggccgaanagcucuu

SEQ ID NO: 7343 - RNA, 38 nt, Artificial Sequence
  Description of Artificial Sequence:  Enzymatic Nucleic Acid
  misc_feature (31)..(31): n stands for inosine
ugccggaucugaugaggccguuaggccgaancaucucg

SEQ ID NO: 7344 - RNA, 38 nt, Artificial Sequence
  Description of Artificial Sequence:  Enzymatic Nucleic Acid
  misc_feature (31)..(31): n stands for inosine
cugccggacugaugaggccguuaggccgaangcaucuc

SEQ ID NO: 7345 - RNA, 38 nt, Artificial Sequence
  Description of Artificial Sequence:  Enzymatic Nucleic Acid
  misc_feature (31)..(31): n stands for inosine
gcucugcccugaugaggccguuaggccgaanauggcau

SEQ ID NO: 7346 - RNA, 38 nt, Artificial Sequence
  Description of Artificial Sequence:  Enzymatic Nucleic Acid
  misc_feature (31)..(31): n stands for inosine
gguugcuccugaugaggccguuaggccgaanccggaug

SEQ ID NO: 7347 - RNA, 38 nt, Artificial Sequence
  Description of Artificial Sequence:  Enzymatic Nucleic Acid
  misc_feature (31)..(31): n stands for inosine
aaucuggucugaugaggccguuaggccgaancucugcc

SEQ ID NO: 7348 - RNA, 38 nt, Artificial Sequence
  Description of Artificial Sequence:  Enzymatic Nucleic Acid
  misc_feature (31)..(31): n stands for inosine
cagaaucucugaugaggccguuaggccgaanuugcucu

SEQ ID NO: 7349 - RNA, 38 nt, Artificial Sequence
  Description of Artificial Sequence:  Enzymatic Nucleic Acid
  misc_feature (31)..(31): n stands for inosine
gcagaauccugaugaggccguuaggccgaanguugcuc

SEQ ID NO: 7350 - RNA, 38 nt, Artificial Sequence
  Description of Artificial Sequence:  Enzymatic Nucleic Acid
  misc_feature (31)..(31): n stands for inosine
gcucccgccugaugaggccguuaggccgaanaaucugg

SEQ ID NO: 7351 - RNA, 38 nt, Artificial Sequence
  Description of Artificial Sequence:  Enzymatic Nucleic Acid
  misc_feature (31)..(31): n stands for inosine
cuccucgccugaugaggccguuaggccgaancgcuccc

SEQ ID NO: 7352 - RNA, 38 nt, Artificial Sequence
  Description of Artificial Sequence:  Enzymatic Nucleic Acid
  misc_feature (31)..(31): n stands for inosine
aaugcagacugaugaggccguuaggccgaancuccucg

SEQ ID NO: 7353 - RNA, 38 nt, Artificial Sequence
  Description of Artificial Sequence:  Enzymatic Nucleic Acid
  misc_feature (31)..(31): n stands for inosine
ggaaaugccugaugaggccguuaggccgaanaagcucc

SEQ ID NO: 7354 - RNA, 38 nt, Artificial Sequence
  Description of Artificial Sequence:  Enzymatic Nucleic Acid
  misc_feature (31)..(31): n stands for inosine
cuuggaaacugaugaggccguuaggccgaancagaagc

SEQ ID NO: 7355 - RNA, 38 nt, Artificial Sequence
  Description of Artificial Sequence:  Enzymatic Nucleic Acid
  misc_feature (31)..(31): n stands for inosine
gcuggcuucugaugaggccguuaggccgaanaaaugca

SEQ ID NO: 7356 - RNA, 38 nt, Artificial Sequence
  Description of Artificial Sequence:  Enzymatic Nucleic Acid
  misc_feature (31)..(31): n stands for inosine
ggcuggcucugaugaggccguuaggccgaangaaaugc

SEQ ID NO: 7357 - RNA, 38 nt, Artificial Sequence
  Description of Artificial Sequence:  Enzymatic Nucleic Acid
  misc_feature (31)..(31): n stands for inosine
cucuggcucugaugaggccguuaggccgaancuuggaa

SEQ ID NO: 7358 - RNA, 38 nt, Artificial Sequence
  Description of Artificial Sequence:  Enzymatic Nucleic Acid
  misc_feature (31)..(31): n stands for inosine
ccucuggccugaugaggccguuaggccgaangcuugga

SEQ ID NO: 7359 - RNA, 38 nt, Artificial Sequence
  Description of Artificial Sequence:  Enzymatic Nucleic Acid
  misc_feature (31)..(31): n stands for inosine
cucccucucugaugaggccguuaggccgaancuggcuu

SEQ ID NO: 7360 - RNA, 38 nt, Artificial Sequence
  Description of Artificial Sequence:  Enzymatic Nucleic Acid
  misc_feature (31)..(31): n stands for inosine
ccucccuccugaugaggccguuaggccgaangcuggcu

SEQ ID NO: 7361 - RNA, 38 nt, Artificial Sequence
  Description of Artificial Sequence:  Enzymatic Nucleic Acid
  misc_feature (31)..(31): n stands for inosine
gcacaugacugaugaggccguuaggccgaanaacuccu

SEQ ID NO: 7362 - RNA, 38 nt, Artificial Sequence
  Description of Artificial Sequence:  Enzymatic Nucleic Acid
  misc_feature (31)..(31): n stands for inosine
ugcacaugcugaugaggccguuaggccgaangaacucc

SEQ ID NO: 7363 - RNA, 38 nt, Artificial Sequence
  Description of Artificial Sequence:  Enzymatic Nucleic Acid
  misc_feature (31)..(31): n stands for inosine
cuugcacacugaugaggccguuaggccgaanaggaacu

SEQ ID NO: 7364 - RNA, 38 nt, Artificial Sequence
  Description of Artificial Sequence:  Enzymatic Nucleic Acid
  misc_feature (31)..(31): n stands for inosine
cuggaacucugaugaggccguuaggccgaancacauga

SEQ ID NO: 7365 - RNA, 38 nt, Artificial Sequence
  Description of Artificial Sequence:  Enzymatic Nucleic Acid
  misc_feature (31)..(31): n stands for inosine
ggccuccucugaugaggccguuaggccgaanaacuugc

SEQ ID NO: 7366 - RNA, 38 nt, Artificial Sequence
  Description of Artificial Sequence:  Enzymatic Nucleic Acid
  misc_feature (31)..(31): n stands for inosine
uggccucccugaugaggccguuaggccgaangaacuug

SEQ ID NO: 7367 - RNA, 38 nt, Artificial Sequence
  Description of Artificial Sequence:  Enzymatic Nucleic Acid
  misc_feature (31)..(31): n stands for inosine
aguuuccucugaugaggccguuaggccgaanccuccug

SEQ ID NO: 7368 - RNA, 38 nt, Artificial Sequence
  Description of Artificial Sequence:  Enzymatic Nucleic Acid
  misc_feature (31)..(31): n stands for inosine
caguuucccugaugaggccguuaggccgaangccuccu

SEQ ID NO: 7369 - RNA, 38 nt, Artificial Sequence
  Description of Artificial Sequence:  Enzymatic Nucleic Acid
  misc_feature (31)..(31): n stands for inosine
ucuccacccugaugaggccguuaggccgaanuuuccug

SEQ ID NO: 7370 - RNA, 38 nt, Artificial Sequence
  Description of Artificial Sequence:  Enzymatic Nucleic Acid
  misc_feature (31)..(31): n stands for inosine
ccaggccgcugaugaggccguuaggccgaanucucucc

SEQ ID NO: 7371 - RNA, 38 nt, Artificial Sequence
  Description of Artificial Sequence:  Enzymatic Nucleic Acid
  misc_feature (31)..(31): n stands for inosine
cuucuccacugaugaggccguuaggccgaanccgaguc

SEQ ID NO: 7372 - RNA, 38 nt, Artificial Sequence
  Description of Artificial Sequence:  Enzymatic Nucleic Acid
  misc_feature (31)..(31): n stands for inosine
gcuucucccugaugaggccguuaggccgaangccgagu

SEQ ID NO: 7373 - RNA, 38 nt, Artificial Sequence
  Description of Artificial Sequence:  Enzymatic Nucleic Acid
  misc_feature (31)..(31): n stands for inosine
ucagaucgcugaugaggccguuaggccgaancuucucc

SEQ ID NO: 7374 - RNA, 38 nt, Artificial Sequence
  Description of Artificial Sequence:  Enzymatic Nucleic Acid
  misc_feature (31)..(31): n stands for inosine
gccucuuccugaugaggccguuaggccgaanaucgagc

SEQ ID NO: 7375 - RNA, 38 nt, Artificial Sequence
  Description of Artificial Sequence:  Enzymatic Nucleic Acid
  misc_feature (31)..(31): n stands for inosine
gcuccuuccugaugaggccguuaggccgaanccucuuc

SEQ ID NO: 7376 - RNA, 38 nt, Artificial Sequence
  Description of Artificial Sequence:  Enzymatic Nucleic Acid
  misc_feature (31)..(31): n stands for inosine
gcagagcccugaugaggccguuaggccgaancuccuuc

SEQ ID NO: 7377 - RNA, 38 nt, Artificial Sequence
  Description of Artificial Sequence:  Enzymatic Nucleic Acid
  misc_feature (31)..(31): n stands for inosine
ucccgcagcugaugaggccguuaggccgaanccugcuc

SEQ ID NO: 7378 - RNA, 38 nt, Artificial Sequence
  Description of Artificial Sequence:  Enzymatic Nucleic Acid
  misc_feature (31)..(31): n stands for inosine
ccucccgccugaugaggccguuaggccgaanagccugc

SEQ ID NO: 7379 - RNA, 38 nt, Artificial Sequence
  Description of Artificial Sequence:  Enzymatic Nucleic Acid
  misc_feature (31)..(31): n stands for inosine
ucuucaggcugaugaggccguuaggccgaancuccacc

SEQ ID NO: 7380 - RNA, 38 nt, Artificial Sequence
  Description of Artificial Sequence:  Enzymatic Nucleic Acid
  misc_feature (31)..(31): n stands for inosine
ucucuucacugaugaggccguuaggccgaanugcucca

SEQ ID NO: 7381 - RNA, 38 nt, Artificial Sequence
  Description of Artificial Sequence:  Enzymatic Nucleic Acid
  misc_feature (31)..(31): n stands for inosine
aucucuuccugaugaggccguuaggccgaangugcucc

SEQ ID NO: 7382 - RNA, 38 nt, Artificial Sequence
  Description of Artificial Sequence:  Enzymatic Nucleic Acid
  misc_feature (31)..(31): n stands for inosine
cugcugcucugaugaggccguuaggccgaancaucucu

SEQ ID NO: 7383 - RNA, 38 nt, Artificial Sequence
  Description of Artificial Sequence:  Enzymatic Nucleic Acid
  misc_feature (31)..(31): n stands for inosine
ucugcugccugaugaggccguuaggccgaangcaucuc

SEQ ID NO: 7384 - RNA, 38 nt, Artificial Sequence
  Description of Artificial Sequence:  Enzymatic Nucleic Acid
  misc_feature (31)..(31): n stands for inosine
ccaucugccugaugaggccguuaggccgaancuggcau

SEQ ID NO: 7385 - RNA, 38 nt, Artificial Sequence
  Description of Artificial Sequence:  Enzymatic Nucleic Acid
  misc_feature (31)..(31): n stands for inosine
cagccauccugaugaggccguuaggccgaancugcugg

SEQ ID NO: 7386 - RNA, 38 nt, Artificial Sequence
  Description of Artificial Sequence:  Enzymatic Nucleic Acid
  misc_feature (31)..(31): n stands for inosine
uuguccuccugaugaggccguuaggccgaanccaucug

SEQ ID NO: 7387 - RNA, 38 nt, Artificial Sequence
  Description of Artificial Sequence:  Enzymatic Nucleic Acid
  misc_feature (31)..(31): n stands for inosine
agaggccucugaugaggccguuaggccgaanuccucag

SEQ ID NO: 7388 - RNA, 38 nt, Artificial Sequence
  Description of Artificial Sequence:  Enzymatic Nucleic Acid
  misc_feature (31)..(31): n stands for inosine
uucacagacugaugaggccguuaggccgaanccuuguc

SEQ ID NO: 7389 - RNA, 38 nt, Artificial Sequence
  Description of Artificial Sequence:  Enzymatic Nucleic Acid
  misc_feature (31)..(31): n stands for inosine
uuucacagcugaugaggccguuaggccgaangccuugu

SEQ ID NO: 7390 - RNA, 38 nt, Artificial Sequence
  Description of Artificial Sequence:  Enzymatic Nucleic Acid
  misc_feature (31)..(31): n stands for inosine
gcuuucaccugaugaggccguuaggccgaanaggccuu

SEQ ID NO: 7391 - RNA, 38 nt, Artificial Sequence
  Description of Artificial Sequence:  Enzymatic Nucleic Acid
  misc_feature (31)..(31): n stands for inosine
gucaccugcugaugaggccguuaggccgaancuuucac

SEQ ID NO: 7392 - RNA, 38 nt, Artificial Sequence
  Description of Artificial Sequence:  Enzymatic Nucleic Acid
  misc_feature (31)..(31): n stands for inosine
cgucaccucugaugaggccguuaggccgaangcuuuca

SEQ ID NO: 7393 - RNA, 38 nt, Artificial Sequence
  Description of Artificial Sequence:  Enzymatic Nucleic Acid
  misc_feature (31)..(31): n stands for inosine
acgucacccugaugaggccguuaggccgaanggcuuuc

SEQ ID NO: 7394 - RNA, 38 nt, Artificial Sequence
  Description of Artificial Sequence:  Enzymatic Nucleic Acid
  misc_feature (31)..(31): n stands for inosine
ccgagcaacugaugaggccguuaggccgaanacgucac

SEQ ID NO: 7395 - RNA, 38 nt, Artificial Sequence
  Description of Artificial Sequence:  Enzymatic Nucleic Acid
  misc_feature (31)..(31): n stands for inosine
cccgagcacugaugaggccguuaggccgaangacguca

SEQ ID NO: 7396 - RNA, 38 nt, Artificial Sequence
  Description of Artificial Sequence:  Enzymatic Nucleic Acid
  misc_feature (31)..(31): n stands for inosine
gcuccccgcugaugaggccguuaggccgaancaaggac

SEQ ID NO: 7397 - RNA, 38 nt, Artificial Sequence
  Description of Artificial Sequence:  Enzymatic Nucleic Acid
  misc_feature (31)..(31): n stands for inosine
ucuccugccugaugaggccguuaggccgaancuccccg

SEQ ID NO: 7398 - RNA, 38 nt, Artificial Sequence
  Description of Artificial Sequence:  Enzymatic Nucleic Acid
  misc_feature (31)..(31): n stands for inosine
ggcucucccugaugaggccguuaggccgaancagcucc

SEQ ID NO: 7399 - RNA, 38 nt, Artificial Sequence
  Description of Artificial Sequence:  Enzymatic Nucleic Acid
  misc_feature (31)..(31): n stands for inosine
gcgacucucugaugaggccguuaggccgaancucuccu

SEQ ID NO: 7400 - RNA, 38 nt, Artificial Sequence
  Description of Artificial Sequence:  Enzymatic Nucleic Acid
  misc_feature (31)..(31): n stands for inosine
agcgacuccugaugaggccguuaggccgaangcucucc

SEQ ID NO: 7401 - RNA, 38 nt, Artificial Sequence
  Description of Artificial Sequence:  Enzymatic Nucleic Acid
  misc_feature (31)..(31): n stands for inosine
agccuccacugaugaggccguuaggccgaancgacucu

SEQ ID NO: 7402 - RNA, 38 nt, Artificial Sequence
  Description of Artificial Sequence:  Enzymatic Nucleic Acid
  misc_feature (31)..(31): n stands for inosine
uuaguggccugaugaggccguuaggccgaanccuccaa

SEQ ID NO: 7403 - RNA, 38 nt, Artificial Sequence
  Description of Artificial Sequence:  Enzymatic Nucleic Acid
  misc_feature (31)..(31): n stands for inosine
uccuuagucugaugaggccguuaggccgaancagccuc

SEQ ID NO: 7404 - RNA, 38 nt, Artificial Sequence
  Description of Artificial Sequence:  Enzymatic Nucleic Acid
  misc_feature (31)..(31): n stands for inosine
uuccuuagcugaugaggccguuaggccgaangcagccu

SEQ ID NO: 7405 - RNA, 38 nt, Artificial Sequence
  Description of Artificial Sequence:  Enzymatic Nucleic Acid
  misc_feature (31)..(31): n stands for inosine
cauuccuucugaugaggccguuaggccgaanuggcagc

SEQ ID NO: 7406 - RNA, 38 nt, Artificial Sequence
  Description of Artificial Sequence:  Enzymatic Nucleic Acid
  misc_feature (31)..(31): n stands for inosine
cagagccucugaugaggccguuaggccgaancauuccu

SEQ ID NO: 7407 - RNA, 38 nt, Artificial Sequence
  Description of Artificial Sequence:  Enzymatic Nucleic Acid
  misc_feature (31)..(31): n stands for inosine
ccagagcccugaugaggccguuaggccgaangcauucc

SEQ ID NO: 7408 - RNA, 38 nt, Artificial Sequence
  Description of Artificial Sequence:  Enzymatic Nucleic Acid
  misc_feature (31)..(31): n stands for inosine
cccuccagcugaugaggccguuaggccgaanccuggca

SEQ ID NO: 7409 - RNA, 38 nt, Artificial Sequence
  Description of Artificial Sequence:  Enzymatic Nucleic Acid
  misc_feature (31)..(31): n stands for inosine
gacccucccugaugaggccguuaggccgaanagccugg

SEQ ID NO: 7410 - RNA, 38 nt, Artificial Sequence
  Description of Artificial Sequence:  Enzymatic Nucleic Acid
  misc_feature (31)..(31): n stands for inosine
gccgcccgcugaugaggccguuaggccgaancccgacc

SEQ ID NO: 7411 - RNA, 38 nt, Artificial Sequence
  Description of Artificial Sequence:  Enzymatic Nucleic Acid
  misc_feature (31)..(31): n stands for inosine
ggccgccccugaugaggccguuaggccgaangcccgac

SEQ ID NO: 7412 - RNA, 38 nt, Artificial Sequence
  Description of Artificial Sequence:  Enzymatic Nucleic Acid
  misc_feature (31)..(31): n stands for inosine
ugcucgcucugaugaggccguuaggccgaanccgcccg

SEQ ID NO: 7413 - RNA, 38 nt, Artificial Sequence
  Description of Artificial Sequence:  Enzymatic Nucleic Acid
  misc_feature (31)..(31): n stands for inosine
cugcucgccugaugaggccguuaggccgaangccgccc

SEQ ID NO: 7414 - RNA, 38 nt, Artificial Sequence
  Description of Artificial Sequence:  Enzymatic Nucleic Acid
  misc_feature (31)..(31): n stands for inosine
gccgcgcccugaugaggccguuaggccgaancucgcug

SEQ ID NO: 7415 - RNA, 38 nt, Artificial Sequence
  Description of Artificial Sequence:  Enzymatic Nucleic Acid
  misc_feature (31)..(31): n stands for inosine
ucuccagccugaugaggccguuaggccgaanccgcgcc

SEQ ID NO: 7416 - RNA, 38 nt, Artificial Sequence
  Description of Artificial Sequence:  Enzymatic Nucleic Acid
  misc_feature (31)..(31): n stands for inosine
cacucucccugaugaggccguuaggccgaancugccgc

SEQ ID NO: 7417 - RNA, 38 nt, Artificial Sequence
  Description of Artificial Sequence:  Enzymatic Nucleic Acid
  misc_feature (31)..(31): n stands for inosine
gcugcugccugaugaggccguuaggccgaancgccucg

SEQ ID NO: 7418 - RNA, 38 nt, Artificial Sequence
  Description of Artificial Sequence:  Enzymatic Nucleic Acid
  misc_feature (31)..(31): n stands for inosine
gcugcugccugaugaggccguuaggccgaancagcgcc

SEQ ID NO: 7419 - RNA, 38 nt, Artificial Sequence
  Description of Artificial Sequence:  Enzymatic Nucleic Acid
  misc_feature (31)..(31): n stands for inosine
ugugcugccugaugaggccguuaggccgaancugcagc

SEQ ID NO: 7420 - RNA, 38 nt, Artificial Sequence
  Description of Artificial Sequence:  Enzymatic Nucleic Acid
  misc_feature (31)..(31): n stands for inosine
cgcugugccugaugaggccguuaggccgaancugcugc

SEQ ID NO: 7421 - RNA, 38 nt, Artificial Sequence
  Description of Artificial Sequence:  Enzymatic Nucleic Acid
  misc_feature (31)..(31): n stands for inosine
gcacgcugcugaugaggccguuaggccgaancugcugc

SEQ ID NO: 7422 - RNA, 38 nt, Artificial Sequence
  Description of Artificial Sequence:  Enzymatic Nucleic Acid
  misc_feature (31)..(31): n stands for inosine
cugcacgccugaugaggccguuaggccgaanugcugcu

SEQ ID NO: 7423 - RNA, 38 nt, Artificial Sequence
  Description of Artificial Sequence:  Enzymatic Nucleic Acid
  misc_feature (31)..(31): n stands for inosine
gguccacccugaugaggccguuaggccgaancacgcug

SEQ ID NO: 7424 - RNA, 38 nt, Artificial Sequence
  Description of Artificial Sequence:  Enzymatic Nucleic Acid
  misc_feature (31)..(31): n stands for inosine
gcgcagcucugaugaggccguuaggccgaanuccaccu

SEQ ID NO: 7425 - RNA, 38 nt, Artificial Sequence
  Description of Artificial Sequence:  Enzymatic Nucleic Acid
  misc_feature (31)..(31): n stands for inosine
ugcgcagccugaugaggccguuaggccgaanguccacc

SEQ ID NO: 7426 - RNA, 38 nt, Artificial Sequence
  Description of Artificial Sequence:  Enzymatic Nucleic Acid
  misc_feature (31)..(31): n stands for inosine
gcaugcgccugaugaggccguuaggccgaancuggucc

SEQ ID NO: 7427 - RNA, 38 nt, Artificial Sequence
  Description of Artificial Sequence:  Enzymatic Nucleic Acid
  misc_feature (31)..(31): n stands for inosine
gcccugcacugaugaggccguuaggccgaancgcagcu

SEQ ID NO: 7428 - RNA, 38 nt, Artificial Sequence
  Description of Artificial Sequence:  Enzymatic Nucleic Acid
  misc_feature (31)..(31): n stands for inosine
ucuggccccugaugaggccguuaggccgaancaugcgc

SEQ ID NO: 7429 - RNA, 38 nt, Artificial Sequence
  Description of Artificial Sequence:  Enzymatic Nucleic Acid
  misc_feature (31)..(31): n stands for inosine
cacgcucucugaugaggccguuaggccgaancccugca

SEQ ID NO: 7430 - RNA, 38 nt, Artificial Sequence
  Description of Artificial Sequence:  Enzymatic Nucleic Acid
  misc_feature (31)..(31): n stands for inosine
ccacgcuccugaugaggccguuaggccgaangcccugc

SEQ ID NO: 7431 - RNA, 38 nt, Artificial Sequence
  Description of Artificial Sequence:  Enzymatic Nucleic Acid
  misc_feature (31)..(31): n stands for inosine
cggagcgccugaugaggccguuaggccgaanccuccac

SEQ ID NO: 7432 - RNA, 38 nt, Artificial Sequence
  Description of Artificial Sequence:  Enzymatic Nucleic Acid
  misc_feature (31)..(31): n stands for inosine
ccaugcggcugaugaggccguuaggccgaancgcggcc

SEQ ID NO: 7433 - RNA, 38 nt, Artificial Sequence
  Description of Artificial Sequence:  Enzymatic Nucleic Acid
  misc_feature (31)..(31): n stands for inosine
cuccaugccugaugaggccguuaggccgaanagcgcgg

SEQ ID NO: 7434 - RNA, 38 nt, Artificial Sequence
  Description of Artificial Sequence:  Enzymatic Nucleic Acid
  misc_feature (31)..(31): n stands for inosine
gcgcuccacugaugaggccguuaggccgaancggagcg

SEQ ID NO: 7435 - RNA, 38 nt, Artificial Sequence
  Description of Artificial Sequence:  Enzymatic Nucleic Acid
  misc_feature (31)..(31): n stands for inosine
ggcggccucugaugaggccguuaggccgaancgcucca

SEQ ID NO: 7436 - RNA, 38 nt, Artificial Sequence
  Description of Artificial Sequence:  Enzymatic Nucleic Acid
  misc_feature (31)..(31): n stands for inosine
aggcggcccugaugaggccguuaggccgaangcgcucc

SEQ ID NO: 7437 - RNA, 38 nt, Artificial Sequence
  Description of Artificial Sequence:  Enzymatic Nucleic Acid
  misc_feature (31)..(31): n stands for inosine
uccgaggccugaugaggccguuaggccgaanccuggcg

SEQ ID NO: 7438 - RNA, 38 nt, Artificial Sequence
  Description of Artificial Sequence:  Enzymatic Nucleic Acid
  misc_feature (31)..(31): n stands for inosine
uccuccgacugaugaggccguuaggccgaancggccug

SEQ ID NO: 7439 - RNA, 38 nt, Artificial Sequence
  Description of Artificial Sequence:  Enzymatic Nucleic Acid
  misc_feature (31)..(31): n stands for inosine
cuccuccgcugaugaggccguuaggccgaangcggccu

SEQ ID NO: 7440 - RNA, 38 nt, Artificial Sequence
  Description of Artificial Sequence:  Enzymatic Nucleic Acid
  misc_feature (31)..(31): n stands for inosine
acugggcccugaugaggccguuaggccgaancuuccuc

SEQ ID NO: 7441 - RNA, 38 nt, Artificial Sequence
  Description of Artificial Sequence:  Enzymatic Nucleic Acid
  misc_feature (31)..(31): n stands for inosine
ugcaacugcugaugaggccguuaggccgaanccagcuu

SEQ ID NO: 7442 - RNA, 38 nt, Artificial Sequence
  Description of Artificial Sequence:  Enzymatic Nucleic Acid
  misc_feature (31)..(31): n stands for inosine
cugcaacucugaugaggccguuaggccgaangccagcu

SEQ ID NO: 7443 - RNA, 38 nt, Artificial Sequence
  Description of Artificial Sequence:  Enzymatic Nucleic Acid
  misc_feature (31)..(31): n stands for inosine
ccugcaaccugaugaggccguuaggccgaanggccagc

SEQ ID NO: 7444 - RNA, 38 nt, Artificial Sequence
  Description of Artificial Sequence:  Enzymatic Nucleic Acid
  misc_feature (31)..(31): n stands for inosine
aggccacccugaugaggccguuaggccgaancaacugg

SEQ ID NO: 7445 - RNA, 38 nt, Artificial Sequence
  Description of Artificial Sequence:  Enzymatic Nucleic Acid
  misc_feature (31)..(31): n stands for inosine
uggugauacugaugaggccguuaggccgaanccaccug

SEQ ID NO: 7446 - RNA, 38 nt, Artificial Sequence
  Description of Artificial Sequence:  Enzymatic Nucleic Acid
  misc_feature (31)..(31): n stands for inosine
cuggugaucugaugaggccguuaggccgaangccaccu

SEQ ID NO: 7447 - RNA, 38 nt, Artificial Sequence
  Description of Artificial Sequence:  Enzymatic Nucleic Acid
  misc_feature (31)..(31): n stands for inosine
agagcuggcugaugaggccguuaggccgaanauaggcc

SEQ ID NO: 7448 - RNA, 38 nt, Artificial Sequence
  Description of Artificial Sequence:  Enzymatic Nucleic Acid
  misc_feature (31)..(31): n stands for inosine
gaagagcucugaugaggccguuaggccgaanugauagg

SEQ ID NO: 7449 - RNA, 38 nt, Artificial Sequence
  Description of Artificial Sequence:  Enzymatic Nucleic Acid
  misc_feature (31)..(31): n stands for inosine
ggaagagccugaugaggccguuaggccgaangugauag

SEQ ID NO: 7450 - RNA, 38 nt, Artificial Sequence
  Description of Artificial Sequence:  Enzymatic Nucleic Acid
  misc_feature (31)..(31): n stands for inosine
cuuggaagcugaugaggccguuaggccgaancugguga

SEQ ID NO: 7451 - RNA, 38 nt, Artificial Sequence
  Description of Artificial Sequence:  Enzymatic Nucleic Acid
  misc_feature (31)..(31): n stands for inosine
uucuuggacugaugaggccguuaggccgaanagcuggu

SEQ ID NO: 7452 - RNA, 38 nt, Artificial Sequence
  Description of Artificial Sequence:  Enzymatic Nucleic Acid
  misc_feature (31)..(31): n stands for inosine
guauucuucugaugaggccguuaggccgaanaagagcu

SEQ ID NO: 7453 - RNA, 38 nt, Artificial Sequence
  Description of Artificial Sequence:  Enzymatic Nucleic Acid
  misc_feature (31)..(31): n stands for inosine
cguauucucugaugaggccguuaggccgaangaagagc

SEQ ID NO: 7454 - RNA, 38 nt, Artificial Sequence
  Description of Artificial Sequence:  Enzymatic Nucleic Acid
  misc_feature (31)..(31): n stands for inosine
gauguggucugaugaggccguuaggccgaanucguauu

SEQ ID NO: 7455 - RNA, 38 nt, Artificial Sequence
  Description of Artificial Sequence:  Enzymatic Nucleic Acid
  misc_feature (31)..(31): n stands for inosine
cuugaugucugaugaggccguuaggccgaanuugucgu

SEQ ID NO: 7456 - RNA, 38 nt, Artificial Sequence
  Description of Artificial Sequence:  Enzymatic Nucleic Acid
  misc_feature (31)..(31): n stands for inosine
ucuugaugcugaugaggccguuaggccgaanguugucg

SEQ ID NO: 7457 - RNA, 38 nt, Artificial Sequence
  Description of Artificial Sequence:  Enzymatic Nucleic Acid
  misc_feature (31)..(31): n stands for inosine
gcucuugacugaugaggccguuaggccgaanugguugu

SEQ ID NO: 7458 - RNA, 38 nt, Artificial Sequence
  Description of Artificial Sequence:  Enzymatic Nucleic Acid
  misc_feature (31)..(31): n stands for inosine
gcugcucucugaugaggccguuaggccgaanauguggu

SEQ ID NO: 7459 - RNA, 38 nt, Artificial Sequence
  Description of Artificial Sequence:  Enzymatic Nucleic Acid
  misc_feature (31)..(31): n stands for inosine
caccacgccugaugaggccguuaggccgaancucuuga

SEQ ID NO: 7460 - RNA, 38 nt, Artificial Sequence
  Description of Artificial Sequence:  Enzymatic Nucleic Acid
  misc_feature (31)..(31): n stands for inosine
ccgcucaccugaugaggccguuaggccgaancccacca

SEQ ID NO: 7461 - RNA, 38 nt, Artificial Sequence
  Description of Artificial Sequence:  Enzymatic Nucleic Acid
  misc_feature (31)..(31): n stands for inosine
cuuccagccugaugaggccguuaggccgaancauuccu

SEQ ID NO: 7462 - RNA, 38 nt, Artificial Sequence
  Description of Artificial Sequence:  Enzymatic Nucleic Acid
  misc_feature (31)..(31): n stands for inosine
gaucuucccugaugaggccguuaggccgaancugcauu

SEQ ID NO: 7463 - RNA, 38 nt, Artificial Sequence
  Description of Artificial Sequence:  Enzymatic Nucleic Acid
  misc_feature (31)..(31): n stands for inosine
gcuguuugcugaugaggccguuaggccgaanaucuucc

SEQ ID NO: 7464 - RNA, 38 nt, Artificial Sequence
  Description of Artificial Sequence:  Enzymatic Nucleic Acid
  misc_feature (31)..(31): n stands for inosine
cugcuguucugaugaggccguuaggccgaanagaucuu

SEQ ID NO: 7465 - RNA, 38 nt, Artificial Sequence
  Description of Artificial Sequence:  Enzymatic Nucleic Acid
  misc_feature (31)..(31): n stands for inosine
ggagcugccugaugaggccguuaggccgaanuuugaga

SEQ ID NO: 7466 - RNA, 38 nt, Artificial Sequence
  Description of Artificial Sequence:  Enzymatic Nucleic Acid
  misc_feature (31)..(31): n stands for inosine
gcuggagccugaugaggccguuaggccgaancuguuug

SEQ ID NO: 7467 - RNA, 38 nt, Artificial Sequence
  Description of Artificial Sequence:  Enzymatic Nucleic Acid
  misc_feature (31)..(31): n stands for inosine
ccugcuggcugaugaggccguuaggccgaancugcugu

SEQ ID NO: 7468 - RNA, 38 nt, Artificial Sequence
  Description of Artificial Sequence:  Enzymatic Nucleic Acid
  misc_feature (31)..(31): n stands for inosine
ggccugcucugaugaggccguuaggccgaanagcugcu

SEQ ID NO: 7469 - RNA, 38 nt, Artificial Sequence
  Description of Artificial Sequence:  Enzymatic Nucleic Acid
  misc_feature (31)..(31): n stands for inosine
cggccugccugaugaggccguuaggccgaangagcugc

SEQ ID NO: 7470 - RNA, 38 nt, Artificial Sequence
  Description of Artificial Sequence:  Enzymatic Nucleic Acid
  misc_feature (31)..(31): n stands for inosine
ccucggcccugaugaggccguuaggccgaancuggagc

SEQ ID NO: 7471 - RNA, 38 nt, Artificial Sequence
  Description of Artificial Sequence:  Enzymatic Nucleic Acid
  misc_feature (31)..(31): n stands for inosine
gccuccuccugaugaggccguuaggccgaanccugcug

SEQ ID NO: 7472 - RNA, 38 nt, Artificial Sequence
  Description of Artificial Sequence:  Enzymatic Nucleic Acid
  misc_feature (31)..(31): n stands for inosine
gccaccagcugaugaggccguuaggccgaanccuccuc

SEQ ID NO: 7473 - RNA, 38 nt, Artificial Sequence
  Description of Artificial Sequence:  Enzymatic Nucleic Acid
  misc_feature (31)..(31): n stands for inosine
ggccaccacugaugaggccguuaggccgaangccuccu

SEQ ID NO: 7474 - RNA, 38 nt, Artificial Sequence
  Description of Artificial Sequence:  Enzymatic Nucleic Acid
  misc_feature (31)..(31): n stands for inosine
uggccacccugaugaggccguuaggccgaanggccucc

SEQ ID NO: 7475 - RNA, 38 nt, Artificial Sequence
  Description of Artificial Sequence:  Enzymatic Nucleic Acid
  misc_feature (31)..(31): n stands for inosine
uccuguuucugaugaggccguuaggccgaanccaccag

SEQ ID NO: 7476 - RNA, 38 nt, Artificial Sequence
  Description of Artificial Sequence:  Enzymatic Nucleic Acid
  misc_feature (31)..(31): n stands for inosine
cuccuguucugaugaggccguuaggccgaangccacca

SEQ ID NO: 7477 - RNA, 38 nt, Artificial Sequence
  Description of Artificial Sequence:  Enzymatic Nucleic Acid
  misc_feature (31)..(31): n stands for inosine
ucaccucccugaugaggccguuaggccgaanuuuggcc

SEQ ID NO: 7478 - RNA, 38 nt, Artificial Sequence
  Description of Artificial Sequence:  Enzymatic Nucleic Acid
  misc_feature (31)..(31): n stands for inosine
ccuccuuccugaugaggccguuaggccgaancuuaucg

SEQ ID NO: 7479 - RNA, 38 nt, Artificial Sequence
  Description of Artificial Sequence:  Enzymatic Nucleic Acid
  misc_feature (31)..(31): n stands for inosine
ugcugcuccugaugaggccguuaggccgaanccuccuc

SEQ ID NO: 7480 - RNA, 38 nt, Artificial Sequence
  Description of Artificial Sequence:  Enzymatic Nucleic Acid
  misc_feature (31)..(31): n stands for inosine
ucuugugccugaugaggccguuaggccgaancucggcc

SEQ ID NO: 7481 - RNA, 38 nt, Artificial Sequence
  Description of Artificial Sequence:  Enzymatic Nucleic Acid
  misc_feature (31)..(31): n stands for inosine
caaucuugcugaugaggccguuaggccgaancugcucg

SEQ ID NO: 7482 - RNA, 38 nt, Artificial Sequence
  Description of Artificial Sequence:  Enzymatic Nucleic Acid
  misc_feature (31)..(31): n stands for inosine
cacaaucucugaugaggccguuaggccgaanugcugcu

SEQ ID NO: 7483 - RNA, 38 nt, Artificial Sequence
  Description of Artificial Sequence:  Enzymatic Nucleic Acid
  misc_feature (31)..(31): n stands for inosine
accggaaccugaugaggccguuaggccgaanucuccau

SEQ ID NO: 7484 - RNA, 38 nt, Artificial Sequence
  Description of Artificial Sequence:  Enzymatic Nucleic Acid
  misc_feature (31)..(31): n stands for inosine
ucagcacccugaugaggccguuaggccgaanaacgguc

SEQ ID NO: 7485 - RNA, 38 nt, Artificial Sequence
  Description of Artificial Sequence:  Enzymatic Nucleic Acid
  misc_feature (31)..(31): n stands for inosine
gggccuuccugaugaggccguuaggccgaancaccgga

SEQ ID NO: 7486 - RNA, 38 nt, Artificial Sequence
  Description of Artificial Sequence:  Enzymatic Nucleic Acid
  misc_feature (31)..(31): n stands for inosine
uccgccugcugaugaggccguuaggccgaanccuucag

SEQ ID NO: 7487 - RNA, 38 nt, Artificial Sequence
  Description of Artificial Sequence:  Enzymatic Nucleic Acid
  misc_feature (31)..(31): n stands for inosine
auccgccucugaugaggccguuaggccgaangccuuca

SEQ ID NO: 7488 - RNA, 38 nt, Artificial Sequence
  Description of Artificial Sequence:  Enzymatic Nucleic Acid
  misc_feature (31)..(31): n stands for inosine
uauccgcccugaugaggccguuaggccgaanggccuuc

SEQ ID NO: 7489 - RNA, 38 nt, Artificial Sequence
  Description of Artificial Sequence:  Enzymatic Nucleic Acid
  misc_feature (31)..(31): n stands for inosine
cgccuugucugaugaggccguuaggccgaanauauccg

SEQ ID NO: 7490 - RNA, 38 nt, Artificial Sequence
  Description of Artificial Sequence:  Enzymatic Nucleic Acid
  misc_feature (31)..(31): n stands for inosine
guccgccucugaugaggccguuaggccgaanuagauau

SEQ ID NO: 7491 - RNA, 38 nt, Artificial Sequence
  Description of Artificial Sequence:  Enzymatic Nucleic Acid
  misc_feature (31)..(31): n stands for inosine
agccuggacugaugaggccguuaggccgaanuccgccu

SEQ ID NO: 7492 - RNA, 38 nt, Artificial Sequence
  Description of Artificial Sequence:  Enzymatic Nucleic Acid
  misc_feature (31)..(31): n stands for inosine
cucagccucugaugaggccguuaggccgaanaaguccg

SEQ ID NO: 7493 - RNA, 38 nt, Artificial Sequence
  Description of Artificial Sequence:  Enzymatic Nucleic Acid
  misc_feature (31)..(31): n stands for inosine
ucucagcccugaugaggccguuaggccgaangaagucc

SEQ ID NO: 7494 - RNA, 38 nt, Artificial Sequence
  Description of Artificial Sequence:  Enzymatic Nucleic Acid
  misc_feature (31)..(31): n stands for inosine
ugccucuccugaugaggccguuaggccgaanccuggaa

SEQ ID NO: 7495 - RNA, 38 nt, Artificial Sequence
  Description of Artificial Sequence:  Enzymatic Nucleic Acid
  misc_feature (31)..(31): n stands for inosine
cccgggcccugaugaggccguuaggccgaanccucuca

SEQ ID NO: 7496 - RNA, 38 nt, Artificial Sequence
  Description of Artificial Sequence:  Enzymatic Nucleic Acid
  misc_feature (31)..(31): n stands for inosine
uucucccgcugaugaggccguuaggccgaanccugccu

SEQ ID NO: 7497 - RNA, 38 nt, Artificial Sequence
  Description of Artificial Sequence:  Enzymatic Nucleic Acid
  misc_feature (31)..(31): n stands for inosine
cuucuccccugaugaggccguuaggccgaangccugcc

SEQ ID NO: 7498 - RNA, 38 nt, Artificial Sequence
  Description of Artificial Sequence:  Enzymatic Nucleic Acid
  misc_feature (31)..(31): n stands for inosine
ucucggcccugaugaggccguuaggccgaancuucucc

SEQ ID NO: 7499 - RNA, 38 nt, Artificial Sequence
  Description of Artificial Sequence:  Enzymatic Nucleic Acid
  misc_feature (31)..(31): n stands for inosine
uucuucuccugaugaggccguuaggccgaanccagcuu

SEQ ID NO: 7500 - RNA, 38 nt, Artificial Sequence
  Description of Artificial Sequence:  Enzymatic Nucleic Acid
  misc_feature (31)..(31): n stands for inosine
ccugcaggcugaugaggccguuaggccgaancuccuuc

SEQ ID NO: 7501 - RNA, 38 nt, Artificial Sequence
  Description of Artificial Sequence:  Enzymatic Nucleic Acid
  misc_feature (31)..(31): n stands for inosine
cuccugcacugaugaggccguuaggccgaanagcuccu

SEQ ID NO: 7502 - RNA, 38 nt, Artificial Sequence
  Description of Artificial Sequence:  Enzymatic Nucleic Acid
  misc_feature (31)..(31): n stands for inosine
gcuccugccugaugaggccguuaggccgaangagcucc

SEQ ID NO: 7503 - RNA, 38 nt, Artificial Sequence
  Description of Artificial Sequence:  Enzymatic Nucleic Acid
  misc_feature (31)..(31): n stands for inosine
gcugcucccugaugaggccguuaggccgaancaggagc

SEQ ID NO: 7504 - RNA, 38 nt, Artificial Sequence
  Description of Artificial Sequence:  Enzymatic Nucleic Acid
  misc_feature (31)..(31): n stands for inosine
gcuccagccugaugaggccguuaggccgaancuccugc

SEQ ID NO: 7505 - RNA, 38 nt, Artificial Sequence
  Description of Artificial Sequence:  Enzymatic Nucleic Acid
  misc_feature (31)..(31): n stands for inosine
gcugcucccugaugaggccguuaggccgaancugcucc

SEQ ID NO: 7506 - RNA, 38 nt, Artificial Sequence
  Description of Artificial Sequence:  Enzymatic Nucleic Acid
  misc_feature (31)..(31): n stands for inosine
ucugcagccugaugaggccguuaggccgaancuccagc

SEQ ID NO: 7507 - RNA, 38 nt, Artificial Sequence
  Description of Artificial Sequence:  Enzymatic Nucleic Acid
  misc_feature (31)..(31): n stands for inosine
cccucugccugaugaggccguuaggccgaancugcucc

SEQ ID NO: 7508 - RNA, 38 nt, Artificial Sequence
  Description of Artificial Sequence:  Enzymatic Nucleic Acid
  misc_feature (31)..(31): n stands for inosine
acucccuccugaugaggccguuaggccgaancagcugc

SEQ ID NO: 7509 - RNA, 38 nt, Artificial Sequence
  Description of Artificial Sequence:  Enzymatic Nucleic Acid
  misc_feature (31)..(31): n stands for inosine
caguuugccugaugaggccguuaggccgaanuacuccc

SEQ ID NO: 7510 - RNA, 38 nt, Artificial Sequence
  Description of Artificial Sequence:  Enzymatic Nucleic Acid
  misc_feature (31)..(31): n stands for inosine
cuucaguucugaugaggccguuaggccgaancuguacu

SEQ ID NO: 7511 - RNA, 38 nt, Artificial Sequence
  Description of Artificial Sequence:  Enzymatic Nucleic Acid
  misc_feature (31)..(31): n stands for inosine
uggccuuccugaugaggccguuaggccgaanuuugcug

SEQ ID NO: 7512 - RNA, 38 nt, Artificial Sequence
  Description of Artificial Sequence:  Enzymatic Nucleic Acid
  misc_feature (31)..(31): n stands for inosine
ugacagcucugaugaggccguuaggccgaanccuucag

SEQ ID NO: 7513 - RNA, 38 nt, Artificial Sequence
  Description of Artificial Sequence:  Enzymatic Nucleic Acid
  misc_feature (31)..(31): n stands for inosine
cugacagccugaugaggccguuaggccgaangccuuca

SEQ ID NO: 7514 - RNA, 38 nt, Artificial Sequence
  Description of Artificial Sequence:  Enzymatic Nucleic Acid
  misc_feature (31)..(31): n stands for inosine
cuccugaccugaugaggccguuaggccgaancuggccu

SEQ ID NO: 7515 - RNA, 38 nt, Artificial Sequence
  Description of Artificial Sequence:  Enzymatic Nucleic Acid
  misc_feature (31)..(31): n stands for inosine
ccgacucccugaugaggccguuaggccgaanacagcug

SEQ ID NO: 7516 - RNA, 38 nt, Artificial Sequence
  Description of Artificial Sequence:  Enzymatic Nucleic Acid
  misc_feature (31)..(31): n stands for inosine
ucgauccucugaugaggccguuaggccgaanccgacuc

SEQ ID NO: 7517 - RNA, 38 nt, Artificial Sequence
  Description of Artificial Sequence:  Enzymatic Nucleic Acid
  misc_feature (31)..(31): n stands for inosine
cucgaucccugaugaggccguuaggccgaangccgacu

SEQ ID NO: 7518 - RNA, 38 nt, Artificial Sequence
  Description of Artificial Sequence:  Enzymatic Nucleic Acid
  misc_feature (31)..(31): n stands for inosine
cuuccucacugaugaggccguuaggccgaanuccucga

SEQ ID NO: 7519 - RNA, 38 nt, Artificial Sequence
  Description of Artificial Sequence:  Enzymatic Nucleic Acid
  misc_feature (31)..(31): n stands for inosine
ccucgacacugaugaggccguuaggccgaanccgcuuc

SEQ ID NO: 7520 - RNA, 38 nt, Artificial Sequence
  Description of Artificial Sequence:  Enzymatic Nucleic Acid
  misc_feature (31)..(31): n stands for inosine
ggccugggcugaugaggccguuaggccgaanaccucga

SEQ ID NO: 7521 - RNA, 38 nt, Artificial Sequence
  Description of Artificial Sequence:  Enzymatic Nucleic Acid
  misc_feature (31)..(31): n stands for inosine
ggggccugcugaugaggccguuaggccgaanagaccuc

SEQ ID NO: 7522 - RNA, 38 nt, Artificial Sequence
  Description of Artificial Sequence:  Enzymatic Nucleic Acid
  misc_feature (31)..(31): n stands for inosine
gggggccucugaugaggccguuaggccgaangagaccu

SEQ ID NO: 7523 - RNA, 38 nt, Artificial Sequence
  Description of Artificial Sequence:  Enzymatic Nucleic Acid
  misc_feature (31)..(31): n stands for inosine
agggggcccugaugaggccguuaggccgaanggagacc

SEQ ID NO: 7524 - RNA, 38 nt, Artificial Sequence
  Description of Artificial Sequence:  Enzymatic Nucleic Acid
  misc_feature (31)..(31): n stands for inosine
ggcaagggcugaugaggccguuaggccgaanccuggga

SEQ ID NO: 7525 - RNA, 38 nt, Artificial Sequence
  Description of Artificial Sequence:  Enzymatic Nucleic Acid
  misc_feature (31)..(31): n stands for inosine
gggcaaggcugaugaggccguuaggccgaangccuggg

SEQ ID NO: 7526 - RNA, 38 nt, Artificial Sequence
  Description of Artificial Sequence:  Enzymatic Nucleic Acid
  misc_feature (31)..(31): n stands for inosine
ggggcaagcugaugaggccguuaggccgaanggccugg

SEQ ID NO: 7527 - RNA, 38 nt, Artificial Sequence
  Description of Artificial Sequence:  Enzymatic Nucleic Acid
  misc_feature (31)..(31): n stands for inosine
gggggcaacugaugaggccguuaggccgaangggccug

SEQ ID NO: 7528 - RNA, 38 nt, Artificial Sequence
  Description of Artificial Sequence:  Enzymatic Nucleic Acid
  misc_feature (31)..(31): n stands for inosine
ggggggcacugaugaggccguuaggccgaanggggccu

SEQ ID NO: 7529 - RNA, 38 nt, Artificial Sequence
  Description of Artificial Sequence:  Enzymatic Nucleic Acid
  misc_feature (31)..(31): n stands for inosine
gggcggggcugaugaggccguuaggccgaancaagggg

SEQ ID NO: 7530 - RNA, 38 nt, Artificial Sequence
  Description of Artificial Sequence:  Enzymatic Nucleic Acid
  misc_feature (31)..(31): n stands for inosine
ggggcgggcugaugaggccguuaggccgaangcaaggg

SEQ ID NO: 7531 - RNA, 38 nt, Artificial Sequence
  Description of Artificial Sequence:  Enzymatic Nucleic Acid
  misc_feature (31)..(31): n stands for inosine
aggggcggcugaugaggccguuaggccgaanggcaagg

SEQ ID NO: 7532 - RNA, 38 nt, Artificial Sequence
  Description of Artificial Sequence:  Enzymatic Nucleic Acid
  misc_feature (31)..(31): n stands for inosine
caggggcgcugaugaggccguuaggccgaangggcaag

SEQ ID NO: 7533 - RNA, 38 nt, Artificial Sequence
  Description of Artificial Sequence:  Enzymatic Nucleic Acid
  misc_feature (31)..(31): n stands for inosine
gcaggggccugaugaggccguuaggccgaanggggcaa

SEQ ID NO: 7534 - RNA, 38 nt, Artificial Sequence
  Description of Artificial Sequence:  Enzymatic Nucleic Acid
  misc_feature (31)..(31): n stands for inosine
uaggcaggcugaugaggccguuaggccgaancgggggg

SEQ ID NO: 7535 - RNA, 38 nt, Artificial Sequence
  Description of Artificial Sequence:  Enzymatic Nucleic Acid
  misc_feature (31)..(31): n stands for inosine
guaggcagcugaugaggccguuaggccgaangcggggg

SEQ ID NO: 7536 - RNA, 38 nt, Artificial Sequence
  Description of Artificial Sequence:  Enzymatic Nucleic Acid
  misc_feature (31)..(31): n stands for inosine
gguaggcacugaugaggccguuaggccgaanggcgggg

SEQ ID NO: 7537 - RNA, 38 nt, Artificial Sequence
  Description of Artificial Sequence:  Enzymatic Nucleic Acid
  misc_feature (31)..(31): n stands for inosine
agguaggccugaugaggccguuaggccgaangggcggg

SEQ ID NO: 7538 - RNA, 38 nt, Artificial Sequence
  Description of Artificial Sequence:  Enzymatic Nucleic Acid
  misc_feature (31)..(31): n stands for inosine
gagagguacugaugaggccguuaggccgaancaggggc

SEQ ID NO: 7539 - RNA, 38 nt, Artificial Sequence
  Description of Artificial Sequence:  Enzymatic Nucleic Acid
  misc_feature (31)..(31): n stands for inosine
ggagaggucugaugaggccguuaggccgaangcagggg

SEQ ID NO: 7540 - RNA, 38 nt, Artificial Sequence
  Description of Artificial Sequence:  Enzymatic Nucleic Acid
  misc_feature (31)..(31): n stands for inosine
agaggagacugaugaggccguuaggccgaanuaggcag

SEQ ID NO: 7541 - RNA, 38 nt, Artificial Sequence
  Description of Artificial Sequence:  Enzymatic Nucleic Acid
  misc_feature (31)..(31): n stands for inosine
gagaggagcugaugaggccguuaggccgaanguaggca

SEQ ID NO: 7542 - RNA, 38 nt, Artificial Sequence
  Description of Artificial Sequence:  Enzymatic Nucleic Acid
  misc_feature (31)..(31): n stands for inosine
gggagaggcugaugaggccguuaggccgaanagguagg

SEQ ID NO: 7543 - RNA, 38 nt, Artificial Sequence
  Description of Artificial Sequence:  Enzymatic Nucleic Acid
  misc_feature (31)..(31): n stands for inosine
aggggagacugaugaggccguuaggccgaanagaggua

SEQ ID NO: 7544 - RNA, 38 nt, Artificial Sequence
  Description of Artificial Sequence:  Enzymatic Nucleic Acid
  misc_feature (31)..(31): n stands for inosine
caggggagcugaugaggccguuaggccgaangagaggu

SEQ ID NO: 7545 - RNA, 38 nt, Artificial Sequence
  Description of Artificial Sequence:  Enzymatic Nucleic Acid
  misc_feature (31)..(31): n stands for inosine
gccaggggcugaugaggccguuaggccgaanaggagag

SEQ ID NO: 7546 - RNA, 38 nt, Artificial Sequence
  Description of Artificial Sequence:  Enzymatic Nucleic Acid
  misc_feature (31)..(31): n stands for inosine
gggccaggcugaugaggccguuaggccgaanagaggag

SEQ ID NO: 7547 - RNA, 38 nt, Artificial Sequence
  Description of Artificial Sequence:  Enzymatic Nucleic Acid
  misc_feature (31)..(31): n stands for inosine
agggccagcugaugaggccguuaggccgaangagagga

SEQ ID NO: 7548 - RNA, 38 nt, Artificial Sequence
  Description of Artificial Sequence:  Enzymatic Nucleic Acid
  misc_feature (31)..(31): n stands for inosine
cagggccacugaugaggccguuaggccgaanggagagg

SEQ ID NO: 7549 - RNA, 38 nt, Artificial Sequence
  Description of Artificial Sequence:  Enzymatic Nucleic Acid
  misc_feature (31)..(31): n stands for inosine
gcagggcccugaugaggccguuaggccgaangggagag

SEQ ID NO: 7550 - RNA, 38 nt, Artificial Sequence
  Description of Artificial Sequence:  Enzymatic Nucleic Acid
  misc_feature (31)..(31): n stands for inosine
cugggcagcugaugaggccguuaggccgaanccagggg

SEQ ID NO: 7551 - RNA, 38 nt, Artificial Sequence
  Description of Artificial Sequence:  Enzymatic Nucleic Acid
  misc_feature (31)..(31): n stands for inosine
gcugggcacugaugaggccguuaggccgaangccaggg

SEQ ID NO: 7552 - RNA, 38 nt, Artificial Sequence
  Description of Artificial Sequence:  Enzymatic Nucleic Acid
  misc_feature (31)..(31): n stands for inosine
ggcugggccugaugaggccguuaggccgaanggccagg

SEQ ID NO: 7553 - RNA, 38 nt, Artificial Sequence
  Description of Artificial Sequence:  Enzymatic Nucleic Acid
  misc_feature (31)..(31): n stands for inosine
ucuggcugcugaugaggccguuaggccgaancagggcc

SEQ ID NO: 7554 - RNA, 38 nt, Artificial Sequence
  Description of Artificial Sequence:  Enzymatic Nucleic Acid
  misc_feature (31)..(31): n stands for inosine
cucuggcucugaugaggccguuaggccgaangcagggc

SEQ ID NO: 7555 - RNA, 38 nt, Artificial Sequence
  Description of Artificial Sequence:  Enzymatic Nucleic Acid
  misc_feature (31)..(31): n stands for inosine
ccucuggccugaugaggccguuaggccgaanggcaggg

SEQ ID NO: 7556 - RNA, 38 nt, Artificial Sequence
  Description of Artificial Sequence:  Enzymatic Nucleic Acid
  misc_feature (31)..(31): n stands for inosine
ccuccucucugaugaggccguuaggccgaancugggca

SEQ ID NO: 7557 - RNA, 38 nt, Artificial Sequence
  Description of Artificial Sequence:  Enzymatic Nucleic Acid
  misc_feature (31)..(31): n stands for inosine
uccuccuccugaugaggccguuaggccgaangcugggc

SEQ ID NO: 7558 - RNA, 38 nt, Artificial Sequence
  Description of Artificial Sequence:  Enzymatic Nucleic Acid
  misc_feature (31)..(31): n stands for inosine
cucgggggcugaugaggccguuaggccgaancuccucc

SEQ ID NO: 7559 - RNA, 38 nt, Artificial Sequence
  Description of Artificial Sequence:  Enzymatic Nucleic Acid
  misc_feature (31)..(31): n stands for inosine
ccucggggcugaugaggccguuaggccgaangcuccuc

SEQ ID NO: 7560 - RNA, 38 nt, Artificial Sequence
  Description of Artificial Sequence:  Enzymatic Nucleic Acid
  misc_feature (31)..(31): n stands for inosine
uccucgggcugaugaggccguuaggccgaanggcuccu

SEQ ID NO: 7561 - RNA, 38 nt, Artificial Sequence
  Description of Artificial Sequence:  Enzymatic Nucleic Acid
  misc_feature (31)..(31): n stands for inosine
cuccucggcugaugaggccguuaggccgaangggcucc

SEQ ID NO: 7562 - RNA, 38 nt, Artificial Sequence
  Description of Artificial Sequence:  Enzymatic Nucleic Acid
  misc_feature (31)..(31): n stands for inosine
gcuccucgcugaugaggccguuaggccgaanggggcuc

SEQ ID NO: 7563 - RNA, 38 nt, Artificial Sequence
  Description of Artificial Sequence:  Enzymatic Nucleic Acid
  misc_feature (31)..(31): n stands for inosine
ggcuccuccugaugaggccguuaggccgaangggggcu

SEQ ID NO: 7564 - RNA, 38 nt, Artificial Sequence
  Description of Artificial Sequence:  Enzymatic Nucleic Acid
  misc_feature (31)..(31): n stands for inosine
agucaggucugaugaggccguuaggccgaancuccucg

SEQ ID NO: 7565 - RNA, 38 nt, Artificial Sequence
  Description of Artificial Sequence:  Enzymatic Nucleic Acid
  misc_feature (31)..(31): n stands for inosine
aagucaggcugaugaggccguuaggccgaangcuccuc

SEQ ID NO: 7566 - RNA, 38 nt, Artificial Sequence
  Description of Artificial Sequence:  Enzymatic Nucleic Acid
  misc_feature (31)..(31): n stands for inosine
agaagucacugaugaggccguuaggccgaanuggcucc

SEQ ID NO: 7567 - RNA, 38 nt, Artificial Sequence
  Description of Artificial Sequence:  Enzymatic Nucleic Acid
  misc_feature (31)..(31): n stands for inosine
cagaaguccugaugaggccguuaggccgaanguggcuc

SEQ ID NO: 7568 - RNA, 38 nt, Artificial Sequence
  Description of Artificial Sequence:  Enzymatic Nucleic Acid
  misc_feature (31)..(31): n stands for inosine
acagcagacugaugaggccguuaggccgaanucaggug

SEQ ID NO: 7569 - RNA, 38 nt, Artificial Sequence
  Description of Artificial Sequence:  Enzymatic Nucleic Acid
  misc_feature (31)..(31): n stands for inosine
gggacagccugaugaggccguuaggccgaanaagucag

SEQ ID NO: 7570 - RNA, 38 nt, Artificial Sequence
  Description of Artificial Sequence:  Enzymatic Nucleic Acid
  misc_feature (31)..(31): n stands for inosine
cuugggaccugaugaggccguuaggccgaancagaagu

SEQ ID NO: 7571 - RNA, 38 nt, Artificial Sequence
  Description of Artificial Sequence:  Enzymatic Nucleic Acid
  misc_feature (31)..(31): n stands for inosine
ggcacuugcugaugaggccguuaggccgaanacagcag

SEQ ID NO: 7572 - RNA, 38 nt, Artificial Sequence
  Description of Artificial Sequence:  Enzymatic Nucleic Acid
  misc_feature (31)..(31): n stands for inosine
uggcacuucugaugaggccguuaggccgaangacagca

SEQ ID NO: 7573 - RNA, 38 nt, Artificial Sequence
  Description of Artificial Sequence:  Enzymatic Nucleic Acid
  misc_feature (31)..(31): n stands for inosine
cuggcacucugaugaggccguuaggccgaanggacagc

SEQ ID NO: 7574 - RNA, 38 nt, Artificial Sequence
  Description of Artificial Sequence:  Enzymatic Nucleic Acid
  misc_feature (31)..(31): n stands for inosine
cugauacucugaugaggccguuaggccgaancacuugg

SEQ ID NO: 7575 - RNA, 38 nt, Artificial Sequence
  Description of Artificial Sequence:  Enzymatic Nucleic Acid
  misc_feature (31)..(31): n stands for inosine
ccugauaccugaugaggccguuaggccgaangcacuug

SEQ ID NO: 7576 - RNA, 38 nt, Artificial Sequence
  Description of Artificial Sequence:  Enzymatic Nucleic Acid
  misc_feature (31)..(31): n stands for inosine
caggggcccugaugaggccguuaggccgaanauacugg

SEQ ID NO: 7577 - RNA, 38 nt, Artificial Sequence
  Description of Artificial Sequence:  Enzymatic Nucleic Acid
  misc_feature (31)..(31): n stands for inosine
auaucaggcugaugaggccguuaggccgaanccugaua

SEQ ID NO: 7578 - RNA, 38 nt, Artificial Sequence
  Description of Artificial Sequence:  Enzymatic Nucleic Acid
  misc_feature (31)..(31): n stands for inosine
cauaucagcugaugaggccguuaggccgaangccugau

SEQ ID NO: 7579 - RNA, 38 nt, Artificial Sequence
  Description of Artificial Sequence:  Enzymatic Nucleic Acid
  misc_feature (31)..(31): n stands for inosine
ccauaucacugaugaggccguuaggccgaanggccuga

SEQ ID NO: 7580 - RNA, 38 nt, Artificial Sequence
  Description of Artificial Sequence:  Enzymatic Nucleic Acid
  misc_feature (31)..(31): n stands for inosine
uccauauccugaugaggccguuaggccgaangggccug

SEQ ID NO: 7581 - RNA, 38 nt, Artificial Sequence
  Description of Artificial Sequence:  Enzymatic Nucleic Acid
  misc_feature (31)..(31): n stands for inosine
cugcagggcugaugaggccguuaggccgaanuccauau

SEQ ID NO: 7582 - RNA, 38 nt, Artificial Sequence
  Description of Artificial Sequence:  Enzymatic Nucleic Acid
  misc_feature (31)..(31): n stands for inosine
aucugcagcugaugaggccguuaggccgaanuguccau

SEQ ID NO: 7583 - RNA, 38 nt, Artificial Sequence
  Description of Artificial Sequence:  Enzymatic Nucleic Acid
  misc_feature (31)..(31): n stands for inosine
uaucugcacugaugaggccguuaggccgaangugucca

SEQ ID NO: 7584 - RNA, 38 nt, Artificial Sequence
  Description of Artificial Sequence:  Enzymatic Nucleic Acid
  misc_feature (31)..(31): n stands for inosine
guaucugccugaugaggccguuaggccgaanggugucc

SEQ ID NO: 7585 - RNA, 38 nt, Artificial Sequence
  Description of Artificial Sequence:  Enzymatic Nucleic Acid
  misc_feature (31)..(31): n stands for inosine
cauguauccugaugaggccguuaggccgaancagggug

SEQ ID NO: 7586 - RNA, 38 nt, Artificial Sequence
  Description of Artificial Sequence:  Enzymatic Nucleic Acid
  misc_feature (31)..(31): n stands for inosine
ccaugacacugaugaggccguuaggccgaanuaucugc

SEQ ID NO: 7587 - RNA, 38 nt, Artificial Sequence
  Description of Artificial Sequence:  Enzymatic Nucleic Acid
  misc_feature (31)..(31): n stands for inosine
gcacuccacugaugaggccguuaggccgaanacaugua

SEQ ID NO: 7588 - RNA, 38 nt, Artificial Sequence
  Description of Artificial Sequence:  Enzymatic Nucleic Acid
  misc_feature (31)..(31): n stands for inosine
cuacucaacugaugaggccguuaggccgaancacucca

SEQ ID NO: 7589 - RNA, 38 nt, Artificial Sequence
  Description of Artificial Sequence:  Enzymatic Nucleic Acid
  misc_feature (31)..(31): n stands for inosine
cacuggcccugaugaggccguuaggccgaancccuacu

SEQ ID NO: 7590 - RNA, 38 nt, Artificial Sequence
  Description of Artificial Sequence:  Enzymatic Nucleic Acid
  misc_feature (31)..(31): n stands for inosine
cuugcacucugaugaggccguuaggccgaanccggccc

SEQ ID NO: 7591 - RNA, 38 nt, Artificial Sequence
  Description of Artificial Sequence:  Enzymatic Nucleic Acid
  misc_feature (31)..(31): n stands for inosine
ccuugcaccugaugaggccguuaggccgaangccggcc

SEQ ID NO: 7592 - RNA, 38 nt, Artificial Sequence
  Description of Artificial Sequence:  Enzymatic Nucleic Acid
  misc_feature (31)..(31): n stands for inosine
aguggccucugaugaggccguuaggccgaancacuggc

SEQ ID NO: 7593 - RNA, 38 nt, Artificial Sequence
  Description of Artificial Sequence:  Enzymatic Nucleic Acid
  misc_feature (31)..(31): n stands for inosine
caggcagucugaugaggccguuaggccgaanccuugca

SEQ ID NO: 7594 - RNA, 38 nt, Artificial Sequence
  Description of Artificial Sequence:  Enzymatic Nucleic Acid
  misc_feature (31)..(31): n stands for inosine
gcaggcagcugaugaggccguuaggccgaangccuugc

SEQ ID NO: 7595 - RNA, 38 nt, Artificial Sequence
  Description of Artificial Sequence:  Enzymatic Nucleic Acid
  misc_feature (31)..(31): n stands for inosine
gggcaggccugaugaggccguuaggccgaanuggccuu

SEQ ID NO: 7596 - RNA, 38 nt, Artificial Sequence
  Description of Artificial Sequence:  Enzymatic Nucleic Acid
  misc_feature (31)..(31): n stands for inosine
cucgggcacugaugaggccguuaggccgaancaguggc

SEQ ID NO: 7597 - RNA, 38 nt, Artificial Sequence
  Description of Artificial Sequence:  Enzymatic Nucleic Acid
  misc_feature (31)..(31): n stands for inosine
ccucgggccugaugaggccguuaggccgaangcagugg

SEQ ID NO: 7598 - RNA, 38 nt, Artificial Sequence
  Description of Artificial Sequence:  Enzymatic Nucleic Acid
  misc_feature (31)..(31): n stands for inosine
cguccucgcugaugaggccguuaggccgaancaggcag

SEQ ID NO: 7599 - RNA, 38 nt, Artificial Sequence
  Description of Artificial Sequence:  Enzymatic Nucleic Acid
  misc_feature (31)..(31): n stands for inosine
acguccuccugaugaggccguuaggccgaangcaggca

SEQ ID NO: 7600 - RNA, 38 nt, Artificial Sequence
  Description of Artificial Sequence:  Enzymatic Nucleic Acid
  misc_feature (31)..(31): n stands for inosine
cggucccgcugaugaggccguuaggccgaancacgucc

SEQ ID NO: 7601 - RNA, 38 nt, Artificial Sequence
  Description of Artificial Sequence:  Enzymatic Nucleic Acid
  misc_feature (31)..(31): n stands for inosine
acgguccccugaugaggccguuaggccgaangcacguc

SEQ ID NO: 7602 - RNA, 38 nt, Artificial Sequence
  Description of Artificial Sequence:  Enzymatic Nucleic Acid
  misc_feature (31)..(31): n stands for inosine
gacugcaccugaugaggccguuaggccgaanucccggg

SEQ ID NO: 7603 - RNA, 38 nt, Artificial Sequence
  Description of Artificial Sequence:  Enzymatic Nucleic Acid
  misc_feature (31)..(31): n stands for inosine
gcgcagaccugaugaggccguuaggccgaancacgguc

SEQ ID NO: 7604 - RNA, 38 nt, Artificial Sequence
  Description of Artificial Sequence:  Enzymatic Nucleic Acid
  misc_feature (31)..(31): n stands for inosine
gaaagcgccugaugaggccguuaggccgaanacugcac

SEQ ID NO: 7605 - RNA, 38 nt, Artificial Sequence
  Description of Artificial Sequence:  Enzymatic Nucleic Acid
  misc_feature (31)..(31): n stands for inosine
gagaggaacugaugaggccguuaggccgaancgcagac

SEQ ID NO: 7606 - RNA, 38 nt, Artificial Sequence
  Description of Artificial Sequence:  Enzymatic Nucleic Acid
  misc_feature (31)..(31): n stands for inosine
gcgggagacugaugaggccguuaggccgaanaaagcgc

SEQ ID NO: 7607 - RNA, 38 nt, Artificial Sequence
  Description of Artificial Sequence:  Enzymatic Nucleic Acid
  misc_feature (31)..(31): n stands for inosine
ggcgggagcugaugaggccguuaggccgaangaaagcg

SEQ ID NO: 7608 - RNA, 38 nt, Artificial Sequence
  Description of Artificial Sequence:  Enzymatic Nucleic Acid
  misc_feature (31)..(31): n stands for inosine
caggcgggcugaugaggccguuaggccgaanaggaaag

SEQ ID NO: 7609 - RNA, 38 nt, Artificial Sequence
  Description of Artificial Sequence:  Enzymatic Nucleic Acid
  misc_feature (31)..(31): n stands for inosine
ggcaggcgcugaugaggccguuaggccgaanagaggaa

SEQ ID NO: 7610 - RNA, 38 nt, Artificial Sequence
  Description of Artificial Sequence:  Enzymatic Nucleic Acid
  misc_feature (31)..(31): n stands for inosine
aggcaggccugaugaggccguuaggccgaangagagga

SEQ ID NO: 7611 - RNA, 38 nt, Artificial Sequence
  Description of Artificial Sequence:  Enzymatic Nucleic Acid
  misc_feature (31)..(31): n stands for inosine
gcuaggcacugaugaggccguuaggccgaancgggaga

SEQ ID NO: 7612 - RNA, 38 nt, Artificial Sequence
  Description of Artificial Sequence:  Enzymatic Nucleic Acid
  misc_feature (31)..(31): n stands for inosine
ggcuaggccugaugaggccguuaggccgaangcgggag

SEQ ID NO: 7613 - RNA, 38 nt, Artificial Sequence
  Description of Artificial Sequence:  Enzymatic Nucleic Acid
  misc_feature (31)..(31): n stands for inosine
cugggcuacugaugaggccguuaggccgaancaggcgg

SEQ ID NO: 7614 - RNA, 38 nt, Artificial Sequence
  Description of Artificial Sequence:  Enzymatic Nucleic Acid
  misc_feature (31)..(31): n stands for inosine
ccugggcucugaugaggccguuaggccgaangcaggcg

SEQ ID NO: 7615 - RNA, 38 nt, Artificial Sequence
  Description of Artificial Sequence:  Enzymatic Nucleic Acid
  misc_feature (31)..(31): n stands for inosine
ucauccugcugaugaggccguuaggccgaancuaggca

SEQ ID NO: 7616 - RNA, 38 nt, Artificial Sequence
  Description of Artificial Sequence:  Enzymatic Nucleic Acid
  misc_feature (31)..(31): n stands for inosine
uucauccucugaugaggccguuaggccgaangcuaggc

SEQ ID NO: 7617 - RNA, 38 nt, Artificial Sequence
  Description of Artificial Sequence:  Enzymatic Nucleic Acid
  misc_feature (31)..(31): n stands for inosine
cuucaucccugaugaggccguuaggccgaanggcuagg

SEQ ID NO: 7618 - RNA, 38 nt, Artificial Sequence
  Description of Artificial Sequence:  Enzymatic Nucleic Acid
  misc_feature (31)..(31): n stands for inosine
ggccaccccugaugaggccguuaggccgaancccuuca

SEQ ID NO: 7619 - RNA, 38 nt, Artificial Sequence
  Description of Artificial Sequence:  Enzymatic Nucleic Acid
  misc_feature (31)..(31): n stands for inosine
ccaguugucugaugaggccguuaggccgaanccaccca

SEQ ID NO: 7620 - RNA, 38 nt, Artificial Sequence
  Description of Artificial Sequence:  Enzymatic Nucleic Acid
  misc_feature (31)..(31): n stands for inosine
cccaguugcugaugaggccguuaggccgaangccaccc

SEQ ID NO: 7621 - RNA, 38 nt, Artificial Sequence
  Description of Artificial Sequence:  Enzymatic Nucleic Acid
  misc_feature (31)..(31): n stands for inosine
aucccagucugaugaggccguuaggccgaanuggccac

SEQ ID NO: 7622 - RNA, 38 nt, Artificial Sequence
  Description of Artificial Sequence:  Enzymatic Nucleic Acid
  misc_feature (31)..(31): n stands for inosine
ggcauccccugaugaggccguuaggccgaanuuguggc

SEQ ID NO: 7623 - RNA, 38 nt, Artificial Sequence
  Description of Artificial Sequence:  Enzymatic Nucleic Acid
  misc_feature (31)..(31): n stands for inosine
cuccaggucugaugaggccguuaggccgaancauccca

SEQ ID NO: 7624 - RNA, 38 nt, Artificial Sequence
  Description of Artificial Sequence:  Enzymatic Nucleic Acid
  misc_feature (31)..(31): n stands for inosine
gcuccaggcugaugaggccguuaggccgaangcauccc

SEQ ID NO: 7625 - RNA, 38 nt, Artificial Sequence
  Description of Artificial Sequence:  Enzymatic Nucleic Acid
  misc_feature (31)..(31): n stands for inosine
gggcuccacugaugaggccguuaggccgaanuggcauc

SEQ ID NO: 7626 - RNA, 38 nt, Artificial Sequence
  Description of Artificial Sequence:  Enzymatic Nucleic Acid
  misc_feature (31)..(31): n stands for inosine
ggggcucccugaugaggccguuaggccgaanguggcau

SEQ ID NO: 7627 - RNA, 38 nt, Artificial Sequence
  Description of Artificial Sequence:  Enzymatic Nucleic Acid
  misc_feature (31)..(31): n stands for inosine
cuggguggcugaugaggccguuaggccgaancuccagg

SEQ ID NO: 7628 - RNA, 38 nt, Artificial Sequence
  Description of Artificial Sequence:  Enzymatic Nucleic Acid
  misc_feature (31)..(31): n stands for inosine
ccugggugcugaugaggccguuaggccgaangcuccag

SEQ ID NO: 7629 - RNA, 38 nt, Artificial Sequence
  Description of Artificial Sequence:  Enzymatic Nucleic Acid
  misc_feature (31)..(31): n stands for inosine
uccugggucugaugaggccguuaggccgaanggcucca

SEQ ID NO: 7630 - RNA, 38 nt, Artificial Sequence
  Description of Artificial Sequence:  Enzymatic Nucleic Acid
  misc_feature (31)..(31): n stands for inosine
cuccugggcugaugaggccguuaggccgaangggcucc

SEQ ID NO: 7631 - RNA, 38 nt, Artificial Sequence
  Description of Artificial Sequence:  Enzymatic Nucleic Acid
  misc_feature (31)..(31): n stands for inosine
agcuccugcugaugaggccguuaggccgaanuggggcu

SEQ ID NO: 7632 - RNA, 38 nt, Artificial Sequence
  Description of Artificial Sequence:  Enzymatic Nucleic Acid
  misc_feature (31)..(31): n stands for inosine
cagcuccucugaugaggccguuaggccgaanguggggc

SEQ ID NO: 7633 - RNA, 38 nt, Artificial Sequence
  Description of Artificial Sequence:  Enzymatic Nucleic Acid
  misc_feature (31)..(31): n stands for inosine
ccagcucccugaugaggccguuaggccgaanggugggg

SEQ ID NO: 7634 - RNA, 38 nt, Artificial Sequence
  Description of Artificial Sequence:  Enzymatic Nucleic Acid
  misc_feature (31)..(31): n stands for inosine
ccgcggcccugaugaggccguuaggccgaancuccugg

SEQ ID NO: 7635 - RNA, 38 nt, Artificial Sequence
  Description of Artificial Sequence:  Enzymatic Nucleic Acid
  misc_feature (31)..(31): n stands for inosine
ggugccgccugaugaggccguuaggccgaanccagcuc

SEQ ID NO: 7636 - RNA, 38 nt, Artificial Sequence
  Description of Artificial Sequence:  Enzymatic Nucleic Acid
  misc_feature (31)..(31): n stands for inosine
gcguaaggcugaugaggccguuaggccgaanccgcggc

SEQ ID NO: 7637 - RNA, 38 nt, Artificial Sequence
  Description of Artificial Sequence:  Enzymatic Nucleic Acid
  misc_feature (31)..(31): n stands for inosine
aagcguaacugaugaggccguuaggccgaanugccgcg

SEQ ID NO: 7638 - RNA, 38 nt, Artificial Sequence
  Description of Artificial Sequence:  Enzymatic Nucleic Acid
  misc_feature (31)..(31): n stands for inosine
gaagcguacugaugaggccguuaggccgaangugccgc

SEQ ID NO: 7639 - RNA, 38 nt, Artificial Sequence
  Description of Artificial Sequence:  Enzymatic Nucleic Acid
  misc_feature (31)..(31): n stands for inosine
acagcugacugaugaggccguuaggccgaancguaagg

SEQ ID NO: 7640 - RNA, 38 nt, Artificial Sequence
  Description of Artificial Sequence:  Enzymatic Nucleic Acid
  misc_feature (31)..(31): n stands for inosine
ucaacagccugaugaggccguuaggccgaanaagcgua

SEQ ID NO: 7641 - RNA, 38 nt, Artificial Sequence
  Description of Artificial Sequence:  Enzymatic Nucleic Acid
  misc_feature (31)..(31): n stands for inosine
ggaucaaccugaugaggccguuaggccgaancugaagc

SEQ ID NO: 7642 - RNA, 38 nt, Artificial Sequence
  Description of Artificial Sequence:  Enzymatic Nucleic Acid
  misc_feature (31)..(31): n stands for inosine
ggaccagccugaugaggccguuaggccgaanaucaaca

SEQ ID NO: 7643 - RNA, 38 nt, Artificial Sequence
  Description of Artificial Sequence:  Enzymatic Nucleic Acid
  misc_feature (31)..(31): n stands for inosine
aggggacccugaugaggccguuaggccgaancggauca

SEQ ID NO: 7644 - RNA, 38 nt, Artificial Sequence
  Description of Artificial Sequence:  Enzymatic Nucleic Acid
  misc_feature (31)..(31): n stands for inosine
aaaagaggcugaugaggccguuaggccgaanaccagcg

SEQ ID NO: 7645 - RNA, 38 nt, Artificial Sequence
  Description of Artificial Sequence:  Enzymatic Nucleic Acid
  misc_feature (31)..(31): n stands for inosine
caaaagagcugaugaggccguuaggccgaangaccagc

SEQ ID NO: 7646 - RNA, 38 nt, Artificial Sequence
  Description of Artificial Sequence:  Enzymatic Nucleic Acid
  misc_feature (31)..(31): n stands for inosine
ccaaaagacugaugaggccguuaggccgaanggaccag

SEQ ID NO: 7647 - RNA, 38 nt, Artificial Sequence
  Description of Artificial Sequence:  Enzymatic Nucleic Acid
  misc_feature (31)..(31): n stands for inosine
cccaaaagcugaugaggccguuaggccgaangggacca

SEQ ID NO: 7648 - RNA, 38 nt, Artificial Sequence
  Description of Artificial Sequence:  Enzymatic Nucleic Acid
  misc_feature (31)..(31): n stands for inosine
accccaaacugaugaggccguuaggccgaanaggggac

SEQ ID NO: 7649 - RNA, 38 nt, Artificial Sequence
  Description of Artificial Sequence:  Enzymatic Nucleic Acid
  misc_feature (31)..(31): n stands for inosine
cugaucggcugaugaggccguuaggccgaanccgcauc

SEQ ID NO: 7650 - RNA, 38 nt, Artificial Sequence
  Description of Artificial Sequence:  Enzymatic Nucleic Acid
  misc_feature (31)..(31): n stands for inosine
ccugaucgcugaugaggccguuaggccgaangccgcau

SEQ ID NO: 7651 - RNA, 38 nt, Artificial Sequence
  Description of Artificial Sequence:  Enzymatic Nucleic Acid
  misc_feature (31)..(31): n stands for inosine
gccugauccugaugaggccguuaggccgaanggccgca

SEQ ID NO: 7652 - RNA, 38 nt, Artificial Sequence
  Description of Artificial Sequence:  Enzymatic Nucleic Acid
  misc_feature (31)..(31): n stands for inosine
gucaggcccugaugaggccguuaggccgaanaucgggg

SEQ ID NO: 7653 - RNA, 38 nt, Artificial Sequence
  Description of Artificial Sequence:  Enzymatic Nucleic Acid
  misc_feature (31)..(31): n stands for inosine
gcgagucacugaugaggccguuaggccgaanccugauc

SEQ ID NO: 7654 - RNA, 38 nt, Artificial Sequence
  Description of Artificial Sequence:  Enzymatic Nucleic Acid
  misc_feature (31)..(31): n stands for inosine
agcgaguccugaugaggccguuaggccgaangccugau

SEQ ID NO: 7655 - RNA, 38 nt, Artificial Sequence
  Description of Artificial Sequence:  Enzymatic Nucleic Acid
  misc_feature (31)..(31): n stands for inosine
gagcagcgcugaugaggccguuaggccgaanucaggcc

SEQ ID NO: 7656 - RNA, 38 nt, Artificial Sequence
  Description of Artificial Sequence:  Enzymatic Nucleic Acid
  misc_feature (31)..(31): n stands for inosine
aaaagagccugaugaggccguuaggccgaancgaguca

SEQ ID NO: 7657 - RNA, 38 nt, Artificial Sequence
  Description of Artificial Sequence:  Enzymatic Nucleic Acid
  misc_feature (31)..(31): n stands for inosine
acaaaaagcugaugaggccguuaggccgaancagcgag

SEQ ID NO: 7658 - RNA, 38 nt, Artificial Sequence
  Description of Artificial Sequence:  Enzymatic Nucleic Acid
  misc_feature (31)..(31): n stands for inosine
gaacaaaacugaugaggccguuaggccgaanagcagcg

SEQ ID NO: 7659 - RNA, 38 nt, Artificial Sequence
  Description of Artificial Sequence:  Enzymatic Nucleic Acid
  misc_feature (31)..(31): n stands for inosine
gacagaagcugaugaggccguuaggccgaanaacaaaa

SEQ ID NO: 7660 - RNA, 38 nt, Artificial Sequence
  Description of Artificial Sequence:  Enzymatic Nucleic Acid
  misc_feature (31)..(31): n stands for inosine
agacagaacugaugaggccguuaggccgaangaacaaa

SEQ ID NO: 7661 - RNA, 38 nt, Artificial Sequence
  Description of Artificial Sequence:  Enzymatic Nucleic Acid
  misc_feature (31)..(31): n stands for inosine
cagacagacugaugaggccguuaggccgaanggaacaa

SEQ ID NO: 7662 - RNA, 38 nt, Artificial Sequence
  Description of Artificial Sequence:  Enzymatic Nucleic Acid
  misc_feature (31)..(31): n stands for inosine
gagcagaccugaugaggccguuaggccgaanaagggaa

SEQ ID NO: 7663 - RNA, 38 nt, Artificial Sequence
  Description of Artificial Sequence:  Enzymatic Nucleic Acid
  misc_feature (31)..(31): n stands for inosine
guucgagccugaugaggccguuaggccgaanacagaag

SEQ ID NO: 7664 - RNA, 38 nt, Artificial Sequence
  Description of Artificial Sequence:  Enzymatic Nucleic Acid
  misc_feature (31)..(31): n stands for inosine
gugguucgcugaugaggccguuaggccgaancagacag

SEQ ID NO: 7665 - RNA, 38 nt, Artificial Sequence
  Description of Artificial Sequence:  Enzymatic Nucleic Acid
  misc_feature (31)..(31): n stands for inosine
aggcaagucugaugaggccguuaggccgaanuucgagc

SEQ ID NO: 7666 - RNA, 38 nt, Artificial Sequence
  Description of Artificial Sequence:  Enzymatic Nucleic Acid
  misc_feature (31)..(31): n stands for inosine
gaggcaagcugaugaggccguuaggccgaanguucgag

SEQ ID NO: 7667 - RNA, 38 nt, Artificial Sequence
  Description of Artificial Sequence:  Enzymatic Nucleic Acid
  misc_feature (31)..(31): n stands for inosine
ccgaggcacugaugaggccguuaggccgaanugguucg

SEQ ID NO: 7668 - RNA, 38 nt, Artificial Sequence
  Description of Artificial Sequence:  Enzymatic Nucleic Acid
  misc_feature (31)..(31): n stands for inosine
uagcccgacugaugaggccguuaggccgaancaagugg

SEQ ID NO: 7669 - RNA, 38 nt, Artificial Sequence
  Description of Artificial Sequence:  Enzymatic Nucleic Acid
  misc_feature (31)..(31): n stands for inosine
uuagcccgcugaugaggccguuaggccgaangcaagug

SEQ ID NO: 7670 - RNA, 38 nt, Artificial Sequence
  Description of Artificial Sequence:  Enzymatic Nucleic Acid
  misc_feature (31)..(31): n stands for inosine
gagggauucugaugaggccguuaggccgaancccgagg

SEQ ID NO: 7671 - RNA, 38 nt, Artificial Sequence
  Description of Artificial Sequence:  Enzymatic Nucleic Acid
  misc_feature (31)..(31): n stands for inosine
agagggagcugaugaggccguuaggccgaanauuagcc

SEQ ID NO: 7672 - RNA, 38 nt, Artificial Sequence
  Description of Artificial Sequence:  Enzymatic Nucleic Acid
  misc_feature (31)..(31): n stands for inosine
aagagggacugaugaggccguuaggccgaangauuagc

SEQ ID NO: 7673 - RNA, 38 nt, Artificial Sequence
  Description of Artificial Sequence:  Enzymatic Nucleic Acid
  misc_feature (31)..(31): n stands for inosine
gaagagggcugaugaggccguuaggccgaanggauuag

SEQ ID NO: 7674 - RNA, 38 nt, Artificial Sequence
  Description of Artificial Sequence:  Enzymatic Nucleic Acid
  misc_feature (31)..(31): n stands for inosine
aggaagagcugaugaggccguuaggccgaanagggauu

SEQ ID NO: 7675 - RNA, 38 nt, Artificial Sequence
  Description of Artificial Sequence:  Enzymatic Nucleic Acid
  misc_feature (31)..(31): n stands for inosine
gaggaagacugaugaggccguuaggccgaangagggau

SEQ ID NO: 7676 - RNA, 38 nt, Artificial Sequence
  Description of Artificial Sequence:  Enzymatic Nucleic Acid
  misc_feature (31)..(31): n stands for inosine
ggaggaagcugaugaggccguuaggccgaanggaggga

SEQ ID NO: 7677 - RNA, 38 nt, Artificial Sequence
  Description of Artificial Sequence:  Enzymatic Nucleic Acid
  misc_feature (31)..(31): n stands for inosine
guggaggacugaugaggccguuaggccgaanagggagg

SEQ ID NO: 7678 - RNA, 38 nt, Artificial Sequence
  Description of Artificial Sequence:  Enzymatic Nucleic Acid
  misc_feature (31)..(31): n stands for inosine
cggguggacugaugaggccguuaggccgaanaagaggg

SEQ ID NO: 7679 - RNA, 38 nt, Artificial Sequence
  Description of Artificial Sequence:  Enzymatic Nucleic Acid
  misc_feature (31)..(31): n stands for inosine
ccggguggcugaugaggccguuaggccgaangaagagg

SEQ ID NO: 7680 - RNA, 38 nt, Artificial Sequence
  Description of Artificial Sequence:  Enzymatic Nucleic Acid
  misc_feature (31)..(31): n stands for inosine
ugccgggucugaugaggccguuaggccgaanaggaaga

SEQ ID NO: 7681 - RNA, 38 nt, Artificial Sequence
  Description of Artificial Sequence:  Enzymatic Nucleic Acid
  misc_feature (31)..(31): n stands for inosine
gugccgggcugaugaggccguuaggccgaangaggaag

SEQ ID NO: 7682 - RNA, 38 nt, Artificial Sequence
  Description of Artificial Sequence:  Enzymatic Nucleic Acid
  misc_feature (31)..(31): n stands for inosine
cagugccgcugaugaggccguuaggccgaanuggagga

SEQ ID NO: 7683 - RNA, 38 nt, Artificial Sequence
  Description of Artificial Sequence:  Enzymatic Nucleic Acid
  misc_feature (31)..(31): n stands for inosine
ccagugcccugaugaggccguuaggccgaanguggagg

SEQ ID NO: 7684 - RNA, 38 nt, Artificial Sequence
  Description of Artificial Sequence:  Enzymatic Nucleic Acid
  misc_feature (31)..(31): n stands for inosine
uuccccagcugaugaggccguuaggccgaanccgggug

SEQ ID NO: 7685 - RNA, 38 nt, Artificial Sequence
  Description of Artificial Sequence:  Enzymatic Nucleic Acid
  misc_feature (31)..(31): n stands for inosine
acuucccccugaugaggccguuaggccgaanugccggg

SEQ ID NO: 7686 - RNA, 38 nt, Artificial Sequence
  Description of Artificial Sequence:  Enzymatic Nucleic Acid
  misc_feature (31)..(31): n stands for inosine
cccauucucugaugaggccguuaggccgaanacuuccc

SEQ ID NO: 7687 - RNA, 38 nt, Artificial Sequence
  Description of Artificial Sequence:  Enzymatic Nucleic Acid
  misc_feature (31)..(31): n stands for inosine
gagccccacugaugaggccguuaggccgaanccccauu

SEQ ID NO: 7688 - RNA, 38 nt, Artificial Sequence
  Description of Artificial Sequence:  Enzymatic Nucleic Acid
  misc_feature (31)..(31): n stands for inosine
agagcccccugaugaggccguuaggccgaangccccau

SEQ ID NO: 7689 - RNA, 38 nt, Artificial Sequence
  Description of Artificial Sequence:  Enzymatic Nucleic Acid
  misc_feature (31)..(31): n stands for inosine
ucccugagcugaugaggccguuaggccgaanccccagg

SEQ ID NO: 7690 - RNA, 38 nt, Artificial Sequence
  Description of Artificial Sequence:  Enzymatic Nucleic Acid
  misc_feature (31)..(31): n stands for inosine
ucucccugcugaugaggccguuaggccgaanagcccca

SEQ ID NO: 7691 - RNA, 38 nt, Artificial Sequence
  Description of Artificial Sequence:  Enzymatic Nucleic Acid
  misc_feature (31)..(31): n stands for inosine
guucuccccugaugaggccguuaggccgaanagagccc

SEQ ID NO: 7692 - RNA, 38 nt, Artificial Sequence
  Description of Artificial Sequence:  Enzymatic Nucleic Acid
  misc_feature (31)..(31): n stands for inosine
ggggaagccugaugaggccguuaggccgaanuucuccc

SEQ ID NO: 7693 - RNA, 38 nt, Artificial Sequence
  Description of Artificial Sequence:  Enzymatic Nucleic Acid
  misc_feature (31)..(31): n stands for inosine
ccaggggacugaugaggccguuaggccgaancaguucu

SEQ ID NO: 7694 - RNA, 38 nt, Artificial Sequence
  Description of Artificial Sequence:  Enzymatic Nucleic Acid
  misc_feature (31)..(31): n stands for inosine
cugccaggcugaugaggccguuaggccgaanaagcagu

SEQ ID NO: 7695 - RNA, 38 nt, Artificial Sequence
  Description of Artificial Sequence:  Enzymatic Nucleic Acid
  misc_feature (31)..(31): n stands for inosine
ucugccagcugaugaggccguuaggccgaangaagcag

SEQ ID NO: 7696 - RNA, 38 nt, Artificial Sequence
  Description of Artificial Sequence:  Enzymatic Nucleic Acid
  misc_feature (31)..(31): n stands for inosine
cucugccacugaugaggccguuaggccgaanggaagca

SEQ ID NO: 7697 - RNA, 38 nt, Artificial Sequence
  Description of Artificial Sequence:  Enzymatic Nucleic Acid
  misc_feature (31)..(31): n stands for inosine
gcucugcccugaugaggccguuaggccgaangggaagc

SEQ ID NO: 7698 - RNA, 38 nt, Artificial Sequence
  Description of Artificial Sequence:  Enzymatic Nucleic Acid
  misc_feature (31)..(31): n stands for inosine
cccagcuccugaugaggccguuaggccgaanccagggg

SEQ ID NO: 7699 - RNA, 38 nt, Artificial Sequence
  Description of Artificial Sequence:  Enzymatic Nucleic Acid
  misc_feature (31)..(31): n stands for inosine
ugccaccccugaugaggccguuaggccgaancucugcc

SEQ ID NO: 7700 - RNA, 38 nt, Artificial Sequence
  Description of Artificial Sequence:  Enzymatic Nucleic Acid
  misc_feature (31)..(31): n stands for inosine
ggaagagccugaugaggccguuaggccgaanccaccca

SEQ ID NO: 7701 - RNA, 38 nt, Artificial Sequence
  Description of Artificial Sequence:  Enzymatic Nucleic Acid
  misc_feature (31)..(31): n stands for inosine
ggaggaagcugaugaggccguuaggccgaancugccac

SEQ ID NO: 7702 - RNA, 38 nt, Artificial Sequence
  Description of Artificial Sequence:  Enzymatic Nucleic Acid
  misc_feature (31)..(31): n stands for inosine
ugggaggacugaugaggccguuaggccgaanagcugcc

SEQ ID NO: 7703 - RNA, 38 nt, Artificial Sequence
  Description of Artificial Sequence:  Enzymatic Nucleic Acid
  misc_feature (31)..(31): n stands for inosine
cggugggacugaugaggccguuaggccgaanaagagcu

SEQ ID NO: 7704 - RNA, 38 nt, Artificial Sequence
  Description of Artificial Sequence:  Enzymatic Nucleic Acid
  misc_feature (31)..(31): n stands for inosine
ccggugggcugaugaggccguuaggccgaangaagagc

SEQ ID NO: 7705 - RNA, 38 nt, Artificial Sequence
  Description of Artificial Sequence:  Enzymatic Nucleic Acid
  misc_feature (31)..(31): n stands for inosine
guccggugcugaugaggccguuaggccgaanaggaaga

SEQ ID NO: 7706 - RNA, 38 nt, Artificial Sequence
  Description of Artificial Sequence:  Enzymatic Nucleic Acid
  misc_feature (31)..(31): n stands for inosine
uguccggucugaugaggccguuaggccgaangaggaag

SEQ ID NO: 7707 - RNA, 38 nt, Artificial Sequence
  Description of Artificial Sequence:  Enzymatic Nucleic Acid
  misc_feature (31)..(31): n stands for inosine
guguccggcugaugaggccguuaggccgaanggaggaa

SEQ ID NO: 7708 - RNA, 38 nt, Artificial Sequence
  Description of Artificial Sequence:  Enzymatic Nucleic Acid
  misc_feature (31)..(31): n stands for inosine
cggugucccugaugaggccguuaggccgaanugggagg

SEQ ID NO: 7709 - RNA, 38 nt, Artificial Sequence
  Description of Artificial Sequence:  Enzymatic Nucleic Acid
  misc_feature (31)..(31): n stands for inosine
cgggucggcugaugaggccguuaggccgaanuccggug

SEQ ID NO: 7710 - RNA, 38 nt, Artificial Sequence
  Description of Artificial Sequence:  Enzymatic Nucleic Acid
  misc_feature (31)..(31): n stands for inosine
ggcggguccugaugaggccguuaggccgaanuguccgg

SEQ ID NO: 7711 - RNA, 38 nt, Artificial Sequence
  Description of Artificial Sequence:  Enzymatic Nucleic Acid
  misc_feature (31)..(31): n stands for inosine
ggcgggcgcugaugaggccguuaggccgaanucggugu

SEQ ID NO: 7712 - RNA, 38 nt, Artificial Sequence
  Description of Artificial Sequence:  Enzymatic Nucleic Acid
  misc_feature (31)..(31): n stands for inosine
cggcgggccugaugaggccguuaggccgaangucggug

SEQ ID NO: 7713 - RNA, 38 nt, Artificial Sequence
  Description of Artificial Sequence:  Enzymatic Nucleic Acid
  misc_feature (31)..(31): n stands for inosine
cagcggcgcugaugaggccguuaggccgaancgggucg

SEQ ID NO: 7714 - RNA, 38 nt, Artificial Sequence
  Description of Artificial Sequence:  Enzymatic Nucleic Acid
  misc_feature (31)..(31): n stands for inosine
acagcggccugaugaggccguuaggccgaangcggguc

SEQ ID NO: 7715 - RNA, 38 nt, Artificial Sequence
  Description of Artificial Sequence:  Enzymatic Nucleic Acid
  misc_feature (31)..(31): n stands for inosine
ggcacagccugaugaggccguuaggccgaancgggcgg

SEQ ID NO: 7716 - RNA, 38 nt, Artificial Sequence
  Description of Artificial Sequence:  Enzymatic Nucleic Acid
  misc_feature (31)..(31): n stands for inosine
cagggcaccugaugaggccguuaggccgaancggcggg

SEQ ID NO: 7717 - RNA, 38 nt, Artificial Sequence
  Description of Artificial Sequence:  Enzymatic Nucleic Acid
  misc_feature (31)..(31): n stands for inosine
acucccagcugaugaggccguuaggccgaancacagcg

SEQ ID NO: 7718 - RNA, 38 nt, Artificial Sequence
  Description of Artificial Sequence:  Enzymatic Nucleic Acid
  misc_feature (31)..(31): n stands for inosine
cacucccacugaugaggccguuaggccgaangcacagc

SEQ ID NO: 7719 - RNA, 38 nt, Artificial Sequence
  Description of Artificial Sequence:  Enzymatic Nucleic Acid
  misc_feature (31)..(31): n stands for inosine
gcacuccccugaugaggccguuaggccgaanggcacag

SEQ ID NO: 7720 - RNA, 38 nt, Artificial Sequence
  Description of Artificial Sequence:  Enzymatic Nucleic Acid
  misc_feature (31)..(31): n stands for inosine
aagagggccugaugaggccguuaggccgaancacuccc

SEQ ID NO: 7721 - RNA, 38 nt, Artificial Sequence
  Description of Artificial Sequence:  Enzymatic Nucleic Acid
  misc_feature (31)..(31): n stands for inosine
gguaagagcugaugaggccguuaggccgaancagcacu

SEQ ID NO: 7722 - RNA, 38 nt, Artificial Sequence
  Description of Artificial Sequence:  Enzymatic Nucleic Acid
  misc_feature (31)..(31): n stands for inosine
ugguaagacugaugaggccguuaggccgaangcagcac

SEQ ID NO: 7723 - RNA, 38 nt, Artificial Sequence
  Description of Artificial Sequence:  Enzymatic Nucleic Acid
  misc_feature (31)..(31): n stands for inosine
augguaagcugaugaggccguuaggccgaanggcagca

SEQ ID NO: 7724 - RNA, 38 nt, Artificial Sequence
  Description of Artificial Sequence:  Enzymatic Nucleic Acid
  misc_feature (31)..(31): n stands for inosine
gcaugguacugaugaggccguuaggccgaanagggcag

SEQ ID NO: 7725 - RNA, 38 nt, Artificial Sequence
  Description of Artificial Sequence:  Enzymatic Nucleic Acid
  misc_feature (31)..(31): n stands for inosine
gugugcaucugaugaggccguuaggccgaanuaagagg

SEQ ID NO: 7726 - RNA, 38 nt, Artificial Sequence
  Description of Artificial Sequence:  Enzymatic Nucleic Acid
  misc_feature (31)..(31): n stands for inosine
cgugugcacugaugaggccguuaggccgaanguaagag

SEQ ID NO: 7727 - RNA, 38 nt, Artificial Sequence
  Description of Artificial Sequence:  Enzymatic Nucleic Acid
  misc_feature (31)..(31): n stands for inosine
cacccgugcugaugaggccguuaggccgaancauggua

SEQ ID NO: 7728 - RNA, 38 nt, Artificial Sequence
  Description of Artificial Sequence:  Enzymatic Nucleic Acid
  misc_feature (31)..(31): n stands for inosine
agcacccgcugaugaggccguuaggccgaanugcaugg

SEQ ID NO: 7729 - RNA, 38 nt, Artificial Sequence
  Description of Artificial Sequence:  Enzymatic Nucleic Acid
  misc_feature (31)..(31): n stands for inosine
aaaaggagcugaugaggccguuaggccgaancacccgu

SEQ ID NO: 7730 - RNA, 38 nt, Artificial Sequence
  Description of Artificial Sequence:  Enzymatic Nucleic Acid
  misc_feature (31)..(31): n stands for inosine
ccaaaaggcugaugaggccguuaggccgaanagcaccc

SEQ ID NO: 7731 - RNA, 38 nt, Artificial Sequence
  Description of Artificial Sequence:  Enzymatic Nucleic Acid
  misc_feature (31)..(31): n stands for inosine
gcccaaaacugaugaggccguuaggccgaanagagcac

SEQ ID NO: 7732 - RNA, 38 nt, Artificial Sequence
  Description of Artificial Sequence:  Enzymatic Nucleic Acid
  misc_feature (31)..(31): n stands for inosine
agcccaaacugaugaggccguuaggccgaangagagca

SEQ ID NO: 7733 - RNA, 38 nt, Artificial Sequence
  Description of Artificial Sequence:  Enzymatic Nucleic Acid
  misc_feature (31)..(31): n stands for inosine
uagcaugccugaugaggccguuaggccgaancccaaaa

SEQ ID NO: 7734 - RNA, 38 nt, Artificial Sequence
  Description of Artificial Sequence:  Enzymatic Nucleic Acid
  misc_feature (31)..(31): n stands for inosine
gaauagcacugaugaggccguuaggccgaancagccca

SEQ ID NO: 7735 - RNA, 38 nt, Artificial Sequence
  Description of Artificial Sequence:  Enzymatic Nucleic Acid
  misc_feature (31)..(31): n stands for inosine
aauggaaucugaugaggccguuaggccgaancaugcag

SEQ ID NO: 7736 - RNA, 38 nt, Artificial Sequence
  Description of Artificial Sequence:  Enzymatic Nucleic Acid
  misc_feature (31)..(31): n stands for inosine
ugcaaaaucugaugaggccguuaggccgaanaauagca

SEQ ID NO: 7737 - RNA, 38 nt, Artificial Sequence
  Description of Artificial Sequence:  Enzymatic Nucleic Acid
  misc_feature (31)..(31): n stands for inosine
cugcaaaacugaugaggccguuaggccgaangaauagc

SEQ ID NO: 7738 - RNA, 38 nt, Artificial Sequence
  Description of Artificial Sequence:  Enzymatic Nucleic Acid
  misc_feature (31)..(31): n stands for inosine
ggucuggccugaugaggccguuaggccgaancaaaaug

SEQ ID NO: 7739 - RNA, 38 nt, Artificial Sequence
  Description of Artificial Sequence:  Enzymatic Nucleic Acid
  misc_feature (31)..(31): n stands for inosine
aucggucucugaugaggccguuaggccgaancugcaaa

SEQ ID NO: 7740 - RNA, 38 nt, Artificial Sequence
  Description of Artificial Sequence:  Enzymatic Nucleic Acid
  misc_feature (31)..(31): n stands for inosine
caucgguccugaugaggccguuaggccgaangcugcaa

SEQ ID NO: 7741 - RNA, 38 nt, Artificial Sequence
  Description of Artificial Sequence:  Enzymatic Nucleic Acid
  misc_feature (31)..(31): n stands for inosine
uacacauccugaugaggccguuaggccgaanucuggcu

SEQ ID NO: 7742 - RNA, 38 nt, Artificial Sequence
  Description of Artificial Sequence:  Enzymatic Nucleic Acid
  misc_feature (31)..(31): n stands for inosine
uagugacucugaugaggccguuaggccgaanuuaaaua

SEQ ID NO: 7743 - RNA, 38 nt, Artificial Sequence
  Description of Artificial Sequence:  Enzymatic Nucleic Acid
  misc_feature (31)..(31): n stands for inosine
auagugaccugaugaggccguuaggccgaanguuaaau

SEQ ID NO: 7744 - RNA, 38 nt, Artificial Sequence
  Description of Artificial Sequence:  Enzymatic Nucleic Acid
  misc_feature (31)..(31): n stands for inosine
aucaauagcugaugaggccguuaggccgaanacugguu

SEQ ID NO: 7745 - RNA, 38 nt, Artificial Sequence
  Description of Artificial Sequence:  Enzymatic Nucleic Acid
  misc_feature (31)..(31): n stands for inosine
ccaucaaucugaugaggccguuaggccgaanugacugg

SEQ ID NO: 7746 - RNA, 38 nt, Artificial Sequence
  Description of Artificial Sequence:  Enzymatic Nucleic Acid
  misc_feature (31)..(31): n stands for inosine
aacccaaacugaugaggccguuaggccgaanuccauca

SEQ ID NO: 7747 - RNA, 38 nt, Artificial Sequence
  Description of Artificial Sequence:  Enzymatic Nucleic Acid
  misc_feature (31)..(31): n stands for inosine
aaaagaugcugaugaggccguuaggccgaanaaacaac

SEQ ID NO: 7748 - RNA, 38 nt, Artificial Sequence
  Description of Artificial Sequence:  Enzymatic Nucleic Acid
  misc_feature (31)..(31): n stands for inosine
aaaaagaucugaugaggccguuaggccgaangaaacaa

SEQ ID NO: 7749 - RNA, 38 nt, Artificial Sequence
  Description of Artificial Sequence:  Enzymatic Nucleic Acid
  misc_feature (31)..(31): n stands for inosine
caaaaagacugaugaggccguuaggccgaanggaaaca

SEQ ID NO: 7750 - RNA, 38 nt, Artificial Sequence
  Description of Artificial Sequence:  Enzymatic Nucleic Acid
  misc_feature (31)..(31): n stands for inosine
uaacaaaacugaugaggccguuaggccgaanaugggaa

SEQ ID NO: 7751 - RNA, 38 nt, Artificial Sequence
  Description of Artificial Sequence:  Enzymatic Nucleic Acid
  misc_feature (31)..(31): n stands for inosine
uuauuuaucugaugaggccguuaggccgaanuaacaaa

SEQ ID NO: 7752 - RNA, 38 nt, Artificial Sequence
  Description of Artificial Sequence:  Enzymatic Nucleic Acid
  misc_feature (31)..(31): n stands for inosine
auuauuuacugaugaggccguuaggccgaanguaacaa

SEQ ID NO: 7753 - RNA, 38 nt, Artificial Sequence
  Description of Artificial Sequence:  Enzymatic Nucleic Acid
  misc_feature (31)..(31): n stands for inosine
uuuuacuacugaugaggccguuaggccgaanccauuau

SEQ ID NO: 7754 - RNA, 37 nt, Artificial Sequence
  Description of Artificial Sequence:  Enzymatic Nucleic Acid
cacaaggggccgaaaggcgagugaggucucaugcucg

SEQ ID NO: 7755 - RNA, 37 nt, Artificial Sequence
  Description of Artificial Sequence:  Enzymatic Nucleic Acid
cuggaucagccgaaaggcgagugaggucuaagggcca

SEQ ID NO: 7756 - RNA, 37 nt, Artificial Sequence
  Description of Artificial Sequence:  Enzymatic Nucleic Acid
uuuccccagccgaaaggcgagugaggucucuggauca

SEQ ID NO: 7757 - RNA, 37 nt, Artificial Sequence
  Description of Artificial Sequence:  Enzymatic Nucleic Acid
ucucuggggccgaaaggcgagugaggucucuuaguuu

SEQ ID NO: 7758 - RNA, 37 nt, Artificial Sequence
  Description of Artificial Sequence:  Enzymatic Nucleic Acid
gguccucagccgaaaggcgagugaggucuuucucugg

SEQ ID NO: 7759 - RNA, 37 nt, Artificial Sequence
  Description of Artificial Sequence:  Enzymatic Nucleic Acid
auagucuggccgaaaggcgagugaggucugggguccu

SEQ ID NO: 7760 - RNA, 37 nt, Artificial Sequence
  Description of Artificial Sequence:  Enzymatic Nucleic Acid
ggaagagagccgaaaggcgagugaggucuugggauug

SEQ ID NO: 7761 - RNA, 37 nt, Artificial Sequence
  Description of Artificial Sequence:  Enzymatic Nucleic Acid
gagcuucagccgaaaggcgagugaggucuagggagug

SEQ ID NO: 7762 - RNA, 37 nt, Artificial Sequence
  Description of Artificial Sequence:  Enzymatic Nucleic Acid
cuggagaggccgaaaggcgagugaggucuuucacagg

SEQ ID NO: 7763 - RNA, 37 nt, Artificial Sequence
  Description of Artificial Sequence:  Enzymatic Nucleic Acid
cgaugauggccgaaaggcgagugaggucuuggagagc

SEQ ID NO: 7764 - RNA, 37 nt, Artificial Sequence
  Description of Artificial Sequence:  Enzymatic Nucleic Acid
ugaugggagccgaaaggcgagugaggucucucgauga

SEQ ID NO: 7765 - RNA, 37 nt, Artificial Sequence
  Description of Artificial Sequence:  Enzymatic Nucleic Acid
ggcaaggggccgaaaggcgagugaggucuugauggga

SEQ ID NO: 7766 - RNA, 37 nt, Artificial Sequence
  Description of Artificial Sequence:  Enzymatic Nucleic Acid
caacaggggccgaaaggcgagugaggucuaagggcug

SEQ ID NO: 7767 - RNA, 37 nt, Artificial Sequence
  Description of Artificial Sequence:  Enzymatic Nucleic Acid
ucauccaagccgaaaggcgagugaggucuagggcaag

SEQ ID NO: 7768 - RNA, 37 nt, Artificial Sequence
  Description of Artificial Sequence:  Enzymatic Nucleic Acid
cagagguggccgaaaggcgagugaggucucuauucau

SEQ ID NO: 7769 - RNA, 37 nt, Artificial Sequence
  Description of Artificial Sequence:  Enzymatic Nucleic Acid
acaguugggccgaaaggcgagugaggucuucuuccag

SEQ ID NO: 7770 - RNA, 37 nt, Artificial Sequence
  Description of Artificial Sequence:  Enzymatic Nucleic Acid
aucucacagccgaaaggcgagugaggucuaguuggcu

SEQ ID NO: 7771 - RNA, 37 nt, Artificial Sequence
  Description of Artificial Sequence:  Enzymatic Nucleic Acid
ccaucucagccgaaaggcgagugaggucuacaguugg

SEQ ID NO: 7772 - RNA, 37 nt, Artificial Sequence
  Description of Artificial Sequence:  Enzymatic Nucleic Acid
gggcugcagccgaaaggcgagugaggucucaucucac

SEQ ID NO: 7773 - RNA, 37 nt, Artificial Sequence
  Description of Artificial Sequence:  Enzymatic Nucleic Acid
cugggcuggccgaaaggcgagugaggucuaccaucuc

SEQ ID NO: 7774 - RNA, 37 nt, Artificial Sequence
  Description of Artificial Sequence:  Enzymatic Nucleic Acid
ccacuggggccgaaaggcgagugaggucuugcaccau

SEQ ID NO: 7775 - RNA, 37 nt, Artificial Sequence
  Description of Artificial Sequence:  Enzymatic Nucleic Acid
ggccaccagccgaaaggcgagugaggucuugggcugc

SEQ ID NO: 7776 - RNA, 37 nt, Artificial Sequence
  Description of Artificial Sequence:  Enzymatic Nucleic Acid
ccgggccagccgaaaggcgagugaggucucacugggc

SEQ ID NO: 7777 - RNA, 37 nt, Artificial Sequence
  Description of Artificial Sequence:  Enzymatic Nucleic Acid
cugccggggccgaaaggcgagugaggucucaccacug

SEQ ID NO: 7778 - RNA, 37 nt, Artificial Sequence
  Description of Artificial Sequence:  Enzymatic Nucleic Acid
aucugcuggccgaaaggcgagugaggucucgggccac

SEQ ID NO: 7779 - RNA, 37 nt, Artificial Sequence
  Description of Artificial Sequence:  Enzymatic Nucleic Acid
cugaucuggccgaaaggcgagugaggucuugccgggc

SEQ ID NO: 7780 - RNA, 37 nt, Artificial Sequence
  Description of Artificial Sequence:  Enzymatic Nucleic Acid
gcccaguagccgaaaggcgagugaggucuguccugau

SEQ ID NO: 7781 - RNA, 37 nt, Artificial Sequence
  Description of Artificial Sequence:  Enzymatic Nucleic Acid
acucuucggccgaaaggcgagugaggucuccaguacg

SEQ ID NO: 7782 - RNA, 37 nt, Artificial Sequence
  Description of Artificial Sequence:  Enzymatic Nucleic Acid
agaggagagccgaaaggcgagugaggucuucuucgcc

SEQ ID NO: 7783 - RNA, 37 nt, Artificial Sequence
  Description of Artificial Sequence:  Enzymatic Nucleic Acid
auggcugggccgaaaggcgagugaggucuuuccccag

SEQ ID NO: 7784 - RNA, 37 nt, Artificial Sequence
  Description of Artificial Sequence:  Enzymatic Nucleic Acid
cagcaugggccgaaaggcgagugaggucuuggcuucc

SEQ ID NO: 7785 - RNA, 37 nt, Artificial Sequence
  Description of Artificial Sequence:  Enzymatic Nucleic Acid
aggugcaggccgaaaggcgagugaggucuauggcugg

SEQ ID NO: 7786 - RNA, 37 nt, Artificial Sequence
  Description of Artificial Sequence:  Enzymatic Nucleic Acid
ggcagguggccgaaaggcgagugaggucuagcauggc

SEQ ID NO: 7787 - RNA, 37 nt, Artificial Sequence
  Description of Artificial Sequence:  Enzymatic Nucleic Acid
ucugaagggccgaaaggcgagugaggucuaggugcag

SEQ ID NO: 7788 - RNA, 37 nt, Artificial Sequence
  Description of Artificial Sequence:  Enzymatic Nucleic Acid
caggagcggccgaaaggcgagugaggucuccuguucu

SEQ ID NO: 7789 - RNA, 37 nt, Artificial Sequence
  Description of Artificial Sequence:  Enzymatic Nucleic Acid
cucaggaggccgaaaggcgagugaggucugcccuguu

SEQ ID NO: 7790 - RNA, 37 nt, Artificial Sequence
  Description of Artificial Sequence:  Enzymatic Nucleic Acid
aggcagcggccgaaaggcgagugaggucuuggagggu

SEQ ID NO: 7791 - RNA, 37 nt, Artificial Sequence
  Description of Artificial Sequence:  Enzymatic Nucleic Acid
ccaggcaggccgaaaggcgagugaggucugcuggagg

SEQ ID NO: 7792 - RNA, 37 nt, Artificial Sequence
  Description of Artificial Sequence:  Enzymatic Nucleic Acid
ccuccagggccgaaaggcgagugaggucuagcgcugg

SEQ ID NO: 7793 - RNA, 37 nt, Artificial Sequence
  Description of Artificial Sequence:  Enzymatic Nucleic Acid
ucucggaggccgaaaggcgagugaggucuucuugauu

SEQ ID NO: 7794 - RNA, 37 nt, Artificial Sequence
  Description of Artificial Sequence:  Enzymatic Nucleic Acid
ccggaugggccgaaaggcgagugaggucuaucucgga

SEQ ID NO: 7795 - RNA, 37 nt, Artificial Sequence
  Description of Artificial Sequence:  Enzymatic Nucleic Acid
uugcucuggccgaaaggcgagugaggucucggauggc

SEQ ID NO: 7796 - RNA, 37 nt, Artificial Sequence
  Description of Artificial Sequence:  Enzymatic Nucleic Acid
ucugguuggccgaaaggcgagugaggucuucugccgg

SEQ ID NO: 7797 - RNA, 37 nt, Artificial Sequence
  Description of Artificial Sequence:  Enzymatic Nucleic Acid
cgcucccggccgaaaggcgagugaggucuagaaucug

SEQ ID NO: 7798 - RNA, 37 nt, Artificial Sequence
  Description of Artificial Sequence:  Enzymatic Nucleic Acid
ucgcagcggccgaaaggcgagugaggucuucccgcag

SEQ ID NO: 7799 - RNA, 37 nt, Artificial Sequence
  Description of Artificial Sequence:  Enzymatic Nucleic Acid
ccucgcaggccgaaaggcgagugaggucugcucccgc

SEQ ID NO: 7800 - RNA, 37 nt, Artificial Sequence
  Description of Artificial Sequence:  Enzymatic Nucleic Acid
gcuccucggccgaaaggcgagugaggucuagcgcucc

SEQ ID NO: 7801 - RNA, 37 nt, Artificial Sequence
  Description of Artificial Sequence:  Enzymatic Nucleic Acid
ugcagaaggccgaaaggcgagugaggucuuccucgca

SEQ ID NO: 7802 - RNA, 37 nt, Artificial Sequence
  Description of Artificial Sequence:  Enzymatic Nucleic Acid
uggaaauggccgaaaggcgagugaggucuagaagcuc

SEQ ID NO: 7803 - RNA, 37 nt, Artificial Sequence
  Description of Artificial Sequence:  Enzymatic Nucleic Acid
cuggcugggccgaaaggcgagugaggucuuuggaaau

SEQ ID NO: 7804 - RNA, 37 nt, Artificial Sequence
  Description of Artificial Sequence:  Enzymatic Nucleic Acid
cccucugggccgaaaggcgagugaggucuuggcuugg

SEQ ID NO: 7805 - RNA, 37 nt, Artificial Sequence
  Description of Artificial Sequence:  Enzymatic Nucleic Acid
augaggaagccgaaaggcgagugaggucuuccuucuc

SEQ ID NO: 7806 - RNA, 37 nt, Artificial Sequence
  Description of Artificial Sequence:  Enzymatic Nucleic Acid
aacuugcagccgaaaggcgagugaggucuaugaggaa

SEQ ID NO: 7807 - RNA, 37 nt, Artificial Sequence
  Description of Artificial Sequence:  Enzymatic Nucleic Acid
ggaacuuggccgaaaggcgagugaggucuacaugagg

SEQ ID NO: 7808 - RNA, 37 nt, Artificial Sequence
  Description of Artificial Sequence:  Enzymatic Nucleic Acid
uccuggaagccgaaaggcgagugaggucuuugcacau

SEQ ID NO: 7809 - RNA, 37 nt, Artificial Sequence
  Description of Artificial Sequence:  Enzymatic Nucleic Acid
uuuccugggccgaaaggcgagugaggucucuccugga

SEQ ID NO: 7810 - RNA, 37 nt, Artificial Sequence
  Description of Artificial Sequence:  Enzymatic Nucleic Acid
ucucuccagccgaaaggcgagugaggucucaguuucc

SEQ ID NO: 7811 - RNA, 37 nt, Artificial Sequence
  Description of Artificial Sequence:  Enzymatic Nucleic Acid
ucuccagggccgaaaggcgagugaggucucgagucuc

SEQ ID NO: 7812 - RNA, 37 nt, Artificial Sequence
  Description of Artificial Sequence:  Enzymatic Nucleic Acid
agaucgaggccgaaaggcgagugaggucuuucuccag

SEQ ID NO: 7813 - RNA, 37 nt, Artificial Sequence
  Description of Artificial Sequence:  Enzymatic Nucleic Acid
uccuucuggccgaaaggcgagugaggucucucuucag

SEQ ID NO: 7814 - RNA, 37 nt, Artificial Sequence
  Description of Artificial Sequence:  Enzymatic Nucleic Acid
agagccuggccgaaaggcgagugaggucuuccuucug

SEQ ID NO: 7815 - RNA, 37 nt, Artificial Sequence
  Description of Artificial Sequence:  Enzymatic Nucleic Acid
ccgcagaggccgaaaggcgagugaggucucugcuccu

SEQ ID NO: 7816 - RNA, 37 nt, Artificial Sequence
  Description of Artificial Sequence:  Enzymatic Nucleic Acid
accucccggccgaaaggcgagugaggucuagagccug

SEQ ID NO: 7817 - RNA, 37 nt, Artificial Sequence
  Description of Artificial Sequence:  Enzymatic Nucleic Acid
gugcuccagccgaaaggcgagugaggucucucccgca

SEQ ID NO: 7818 - RNA, 37 nt, Artificial Sequence
  Description of Artificial Sequence:  Enzymatic Nucleic Acid
uucagguggccgaaaggcgagugaggucuuccaccuc

SEQ ID NO: 7819 - RNA, 37 nt, Artificial Sequence
  Description of Artificial Sequence:  Enzymatic Nucleic Acid
gcugcugggccgaaaggcgagugaggucuaucucuuc

SEQ ID NO: 7820 - RNA, 37 nt, Artificial Sequence
  Description of Artificial Sequence:  Enzymatic Nucleic Acid
aucugcuggccgaaaggcgagugaggucuuggcaucu

SEQ ID NO: 7821 - RNA, 37 nt, Artificial Sequence
  Description of Artificial Sequence:  Enzymatic Nucleic Acid
gccaucuggccgaaaggcgagugaggucuugcuggca

SEQ ID NO: 7822 - RNA, 37 nt, Artificial Sequence
  Description of Artificial Sequence:  Enzymatic Nucleic Acid
guccucaggccgaaaggcgagugaggucucaucugcu

SEQ ID NO: 7823 - RNA, 37 nt, Artificial Sequence
  Description of Artificial Sequence:  Enzymatic Nucleic Acid
cacagagggccgaaaggcgagugaggucucuuguccu

SEQ ID NO: 7824 - RNA, 37 nt, Artificial Sequence
  Description of Artificial Sequence:  Enzymatic Nucleic Acid
ggcuuucagccgaaaggcgagugaggucuagaggccu

SEQ ID NO: 7825 - RNA, 37 nt, Artificial Sequence
  Description of Artificial Sequence:  Enzymatic Nucleic Acid
caccuggggccgaaaggcgagugaggucuuuucacag

SEQ ID NO: 7826 - RNA, 37 nt, Artificial Sequence
  Description of Artificial Sequence:  Enzymatic Nucleic Acid
ggacgucagccgaaaggcgagugaggucucugggcuu

SEQ ID NO: 7827 - RNA, 37 nt, Artificial Sequence
  Description of Artificial Sequence:  Enzymatic Nucleic Acid
agcaaggagccgaaaggcgagugaggucugucaccug

SEQ ID NO: 7828 - RNA, 37 nt, Artificial Sequence
  Description of Artificial Sequence:  Enzymatic Nucleic Acid
uccccgaggccgaaaggcgagugaggucuaaggacgu

SEQ ID NO: 7829 - RNA, 37 nt, Artificial Sequence
  Description of Artificial Sequence:  Enzymatic Nucleic Acid
uccugcaggccgaaaggcgagugaggucuuccccgag

SEQ ID NO: 7830 - RNA, 37 nt, Artificial Sequence
  Description of Artificial Sequence:  Enzymatic Nucleic Acid
cucuccuggccgaaaggcgagugaggucuagcucccc

SEQ ID NO: 7831 - RNA, 37 nt, Artificial Sequence
  Description of Artificial Sequence:  Enzymatic Nucleic Acid
gacucugggccgaaaggcgagugaggucuucuccugc

SEQ ID NO: 7832 - RNA, 37 nt, Artificial Sequence
  Description of Artificial Sequence:  Enzymatic Nucleic Acid
ccaagcgagccgaaaggcgagugaggucuucuggcuc

SEQ ID NO: 7833 - RNA, 37 nt, Artificial Sequence
  Description of Artificial Sequence:  Enzymatic Nucleic Acid
ccuccaaggccgaaaggcgagugaggucugacucugg

SEQ ID NO: 7834 - RNA, 37 nt, Artificial Sequence
  Description of Artificial Sequence:  Enzymatic Nucleic Acid
aguggcaggccgaaaggcgagugaggucucuccaagc

SEQ ID NO: 7835 - RNA, 37 nt, Artificial Sequence
  Description of Artificial Sequence:  Enzymatic Nucleic Acid
cuuagugggccgaaaggcgagugaggucuagccucca

SEQ ID NO: 7836 - RNA, 37 nt, Artificial Sequence
  Description of Artificial Sequence:  Enzymatic Nucleic Acid
gagccugggccgaaaggcgagugaggucuauuccuua

SEQ ID NO: 7837 - RNA, 37 nt, Artificial Sequence
  Description of Artificial Sequence:  Enzymatic Nucleic Acid
cuccagaggccgaaaggcgagugaggucucuggcauu

SEQ ID NO: 7838 - RNA, 37 nt, Artificial Sequence
  Description of Artificial Sequence:  Enzymatic Nucleic Acid
gggcccgagccgaaaggcgagugaggucuccuccaga

SEQ ID NO: 7839 - RNA, 37 nt, Artificial Sequence
  Description of Artificial Sequence:  Enzymatic Nucleic Acid
cgcccggggccgaaaggcgagugaggucuccgacccu

SEQ ID NO: 7840 - RNA, 37 nt, Artificial Sequence
  Description of Artificial Sequence:  Enzymatic Nucleic Acid
gcuggccggccgaaaggcgagugaggucuccgggccc

SEQ ID NO: 7841 - RNA, 37 nt, Artificial Sequence
  Description of Artificial Sequence:  Enzymatic Nucleic Acid
cucgcugggccgaaaggcgagugaggucucgcccggg

SEQ ID NO: 7842 - RNA, 37 nt, Artificial Sequence
  Description of Artificial Sequence:  Enzymatic Nucleic Acid
ccugcucggccgaaaggcgagugaggucuuggccgcc

SEQ ID NO: 7843 - RNA, 37 nt, Artificial Sequence
  Description of Artificial Sequence:  Enzymatic Nucleic Acid
cgcgccuggccgaaaggcgagugaggucuucgcuggc

SEQ ID NO: 7844 - RNA, 37 nt, Artificial Sequence
  Description of Artificial Sequence:  Enzymatic Nucleic Acid
cugccgcggccgaaaggcgagugaggucucugcucgc

SEQ ID NO: 7845 - RNA, 37 nt, Artificial Sequence
  Description of Artificial Sequence:  Enzymatic Nucleic Acid
agcugccggccgaaaggcgagugaggucugccugcuc

SEQ ID NO: 7846 - RNA, 37 nt, Artificial Sequence
  Description of Artificial Sequence:  Enzymatic Nucleic Acid
uccagcuggccgaaaggcgagugaggucucgcgccug

SEQ ID NO: 7847 - RNA, 37 nt, Artificial Sequence
  Description of Artificial Sequence:  Enzymatic Nucleic Acid
cucuccaggccgaaaggcgagugaggucuugccgcgc

SEQ ID NO: 7848 - RNA, 37 nt, Artificial Sequence
  Description of Artificial Sequence:  Enzymatic Nucleic Acid
cgcgcucagccgaaaggcgagugaggucuucuccagc

SEQ ID NO: 7849 - RNA, 37 nt, Artificial Sequence
  Description of Artificial Sequence:  Enzymatic Nucleic Acid
gccucgcggccgaaaggcgagugaggucuucacucuc

SEQ ID NO: 7850 - RNA, 37 nt, Artificial Sequence
  Description of Artificial Sequence:  Enzymatic Nucleic Acid
gcgccucggccgaaaggcgagugaggucugcucacuc

SEQ ID NO: 7851 - RNA, 37 nt, Artificial Sequence
  Description of Artificial Sequence:  Enzymatic Nucleic Acid
cugcagcggccgaaaggcgagugaggucucucgcgcu

SEQ ID NO: 7852 - RNA, 37 nt, Artificial Sequence
  Description of Artificial Sequence:  Enzymatic Nucleic Acid
ugcugcaggccgaaaggcgagugaggucugccucgcg

SEQ ID NO: 7853 - RNA, 37 nt, Artificial Sequence
  Description of Artificial Sequence:  Enzymatic Nucleic Acid
ugcugcuggccgaaaggcgagugaggucuagcgccuc

SEQ ID NO: 7854 - RNA, 37 nt, Artificial Sequence
  Description of Artificial Sequence:  Enzymatic Nucleic Acid
ugcugcuggccgaaaggcgagugaggucuugcagcgc

SEQ ID NO: 7855 - RNA, 37 nt, Artificial Sequence
  Description of Artificial Sequence:  Enzymatic Nucleic Acid
cugugcuggccgaaaggcgagugaggucuugcugcag

SEQ ID NO: 7856 - RNA, 37 nt, Artificial Sequence
  Description of Artificial Sequence:  Enzymatic Nucleic Acid
acgcuguggccgaaaggcgagugaggucuugcugcug

SEQ ID NO: 7857 - RNA, 37 nt, Artificial Sequence
  Description of Artificial Sequence:  Enzymatic Nucleic Acid
ccugcacggccgaaaggcgagugaggucuugugcugc

SEQ ID NO: 7858 - RNA, 37 nt, Artificial Sequence
  Description of Artificial Sequence:  Enzymatic Nucleic Acid
caccugcagccgaaaggcgagugaggucugcugugcu

SEQ ID NO: 7859 - RNA, 37 nt, Artificial Sequence
  Description of Artificial Sequence:  Enzymatic Nucleic Acid
uccaccuggccgaaaggcgagugaggucuacgcugug

SEQ ID NO: 7860 - RNA, 37 nt, Artificial Sequence
  Description of Artificial Sequence:  Enzymatic Nucleic Acid
cugguccagccgaaaggcgagugaggucucugcacgc

SEQ ID NO: 7861 - RNA, 37 nt, Artificial Sequence
  Description of Artificial Sequence:  Enzymatic Nucleic Acid
augcgcaggccgaaaggcgagugaggucuugguccac

SEQ ID NO: 7862 - RNA, 37 nt, Artificial Sequence
  Description of Artificial Sequence:  Enzymatic Nucleic Acid
ugcaugcggccgaaaggcgagugaggucuagcugguc

SEQ ID NO: 7863 - RNA, 37 nt, Artificial Sequence
  Description of Artificial Sequence:  Enzymatic Nucleic Acid
ccugcauggccgaaaggcgagugaggucugcagcugg

SEQ ID NO: 7864 - RNA, 37 nt, Artificial Sequence
  Description of Artificial Sequence:  Enzymatic Nucleic Acid
uggcccuggccgaaaggcgagugaggucuaugcgcag

SEQ ID NO: 7865 - RNA, 37 nt, Artificial Sequence
  Description of Artificial Sequence:  Enzymatic Nucleic Acid
cgcucugggccgaaaggcgagugaggucuccugcaug

SEQ ID NO: 7866 - RNA, 37 nt, Artificial Sequence
  Description of Artificial Sequence:  Enzymatic Nucleic Acid
ccuccacggccgaaaggcgagugaggucuucuggccc

SEQ ID NO: 7867 - RNA, 37 nt, Artificial Sequence
  Description of Artificial Sequence:  Enzymatic Nucleic Acid
ggccuccagccgaaaggcgagugaggucugcucuggc

SEQ ID NO: 7868 - RNA, 37 nt, Artificial Sequence
  Description of Artificial Sequence:  Enzymatic Nucleic Acid
gagcgcgggccgaaaggcgagugaggucucuccacgc

SEQ ID NO: 7869 - RNA, 37 nt, Artificial Sequence
  Description of Artificial Sequence:  Enzymatic Nucleic Acid
gcggagcggccgaaaggcgagugaggucuggccucca

SEQ ID NO: 7870 - RNA, 37 nt, Artificial Sequence
  Description of Artificial Sequence:  Enzymatic Nucleic Acid
augcggaggccgaaaggcgagugaggucugcggccuc

SEQ ID NO: 7871 - RNA, 37 nt, Artificial Sequence
  Description of Artificial Sequence:  Enzymatic Nucleic Acid
gcuccauggccgaaaggcgagugaggucuggagcgcg

SEQ ID NO: 7872 - RNA, 37 nt, Artificial Sequence
  Description of Artificial Sequence:  Enzymatic Nucleic Acid
gccuggcggccgaaaggcgagugaggucuuccaugcg

SEQ ID NO: 7873 - RNA, 37 nt, Artificial Sequence
  Description of Artificial Sequence:  Enzymatic Nucleic Acid
cggccugggccgaaaggcgagugaggucugcuccaug

SEQ ID NO: 7874 - RNA, 37 nt, Artificial Sequence
  Description of Artificial Sequence:  Enzymatic Nucleic Acid
cgaggcgggccgaaaggcgagugaggucucuggcgcu

SEQ ID NO: 7875 - RNA, 37 nt, Artificial Sequence
  Description of Artificial Sequence:  Enzymatic Nucleic Acid
cuccgagggccgaaaggcgagugaggucuggccuggc

SEQ ID NO: 7876 - RNA, 37 nt, Artificial Sequence
  Description of Artificial Sequence:  Enzymatic Nucleic Acid
ugggccaggccgaaaggcgagugaggucuuuccucuu

SEQ ID NO: 7877 - RNA, 37 nt, Artificial Sequence
  Description of Artificial Sequence:  Enzymatic Nucleic Acid
caacuggggccgaaaggcgagugaggucucagcuucc

SEQ ID NO: 7878 - RNA, 37 nt, Artificial Sequence
  Description of Artificial Sequence:  Enzymatic Nucleic Acid
accugcaagccgaaaggcgagugaggucuugggccag

SEQ ID NO: 7879 - RNA, 37 nt, Artificial Sequence
  Description of Artificial Sequence:  Enzymatic Nucleic Acid
gccaccuggccgaaaggcgagugaggucuaacugggc

SEQ ID NO: 7880 - RNA, 37 nt, Artificial Sequence
  Description of Artificial Sequence:  Enzymatic Nucleic Acid
auaggccagccgaaaggcgagugaggucucugcaacu

SEQ ID NO: 7881 - RNA, 37 nt, Artificial Sequence
  Description of Artificial Sequence:  Enzymatic Nucleic Acid
gugauagggccgaaaggcgagugaggucucaccugca

SEQ ID NO: 7882 - RNA, 37 nt, Artificial Sequence
  Description of Artificial Sequence:  Enzymatic Nucleic Acid
uggaagaggccgaaaggcgagugaggucuuggugaua

SEQ ID NO: 7883 - RNA, 37 nt, Artificial Sequence
  Description of Artificial Sequence:  Enzymatic Nucleic Acid
ccacgcuggccgaaaggcgagugaggucuucuugaug

SEQ ID NO: 7884 - RNA, 37 nt, Artificial Sequence
  Description of Artificial Sequence:  Enzymatic Nucleic Acid
ccaccacggccgaaaggcgagugaggucuugcucuug

SEQ ID NO: 7885 - RNA, 37 nt, Artificial Sequence
  Description of Artificial Sequence:  Enzymatic Nucleic Acid
gcccaccagccgaaaggcgagugaggucugcugcucu

SEQ ID NO: 7886 - RNA, 37 nt, Artificial Sequence
  Description of Artificial Sequence:  Enzymatic Nucleic Acid
acugcccagccgaaaggcgagugaggucucacgcugc

SEQ ID NO: 7887 - RNA, 37 nt, Artificial Sequence
  Description of Artificial Sequence:  Enzymatic Nucleic Acid
gcucacuggccgaaaggcgagugaggucuccaccacg

SEQ ID NO: 7888 - RNA, 37 nt, Artificial Sequence
  Description of Artificial Sequence:  Enzymatic Nucleic Acid
uccgcucagccgaaaggcgagugaggucuugcccacc

SEQ ID NO: 7889 - RNA, 37 nt, Artificial Sequence
  Description of Artificial Sequence:  Enzymatic Nucleic Acid
cgcuuccggccgaaaggcgagugaggucuucacugcc

SEQ ID NO: 7890 - RNA, 37 nt, Artificial Sequence
  Description of Artificial Sequence:  Enzymatic Nucleic Acid
auuccucggccgaaaggcgagugaggucuuuccgcuc

SEQ ID NO: 7891 - RNA, 37 nt, Artificial Sequence
  Description of Artificial Sequence:  Enzymatic Nucleic Acid
uccagcuggccgaaaggcgagugaggucuauuccucg

SEQ ID NO: 7892 - RNA, 37 nt, Artificial Sequence
  Description of Artificial Sequence:  Enzymatic Nucleic Acid
ucuuccaggccgaaaggcgagugaggucuugcauucc

SEQ ID NO: 7893 - RNA, 37 nt, Artificial Sequence
  Description of Artificial Sequence:  Enzymatic Nucleic Acid
uggagcuggccgaaaggcgagugaggucuuguuugag

SEQ ID NO: 7894 - RNA, 37 nt, Artificial Sequence
  Description of Artificial Sequence:  Enzymatic Nucleic Acid
ugcuggaggccgaaaggcgagugaggucuugcuguuu

SEQ ID NO: 7895 - RNA, 37 nt, Artificial Sequence
  Description of Artificial Sequence:  Enzymatic Nucleic Acid
ucggccuggccgaaaggcgagugaggucuuggagcug

SEQ ID NO: 7896 - RNA, 37 nt, Artificial Sequence
  Description of Artificial Sequence:  Enzymatic Nucleic Acid
cuccucgggccgaaaggcgagugaggucucugcugga

SEQ ID NO: 7897 - RNA, 37 nt, Artificial Sequence
  Description of Artificial Sequence:  Enzymatic Nucleic Acid
caccaggggccgaaaggcgagugaggucucuccucgg

SEQ ID NO: 7898 - RNA, 37 nt, Artificial Sequence
  Description of Artificial Sequence:  Enzymatic Nucleic Acid
uuuggccagccgaaaggcgagugaggucucagggccu

SEQ ID NO: 7899 - RNA, 37 nt, Artificial Sequence
  Description of Artificial Sequence:  Enzymatic Nucleic Acid
cuguuugggccgaaaggcgagugaggucucaccaggg

SEQ ID NO: 7900 - RNA, 37 nt, Artificial Sequence
  Description of Artificial Sequence:  Enzymatic Nucleic Acid
aucgaucagccgaaaggcgagugaggucucuccuguu

SEQ ID NO: 7901 - RNA, 37 nt, Artificial Sequence
  Description of Artificial Sequence:  Enzymatic Nucleic Acid
uccuucaggccgaaaggcgagugaggucuuuaucgau

SEQ ID NO: 7902 - RNA, 37 nt, Artificial Sequence
  Description of Artificial Sequence:  Enzymatic Nucleic Acid
cugcucgggccgaaaggcgagugaggucucuccuccu

SEQ ID NO: 7903 - RNA, 37 nt, Artificial Sequence
  Description of Artificial Sequence:  Enzymatic Nucleic Acid
uugugcuggccgaaaggcgagugaggucuucggccuc

SEQ ID NO: 7904 - RNA, 37 nt, Artificial Sequence
  Description of Artificial Sequence:  Enzymatic Nucleic Acid
aucuuguggccgaaaggcgagugaggucuugcucggc

SEQ ID NO: 7905 - RNA, 37 nt, Artificial Sequence
  Description of Artificial Sequence:  Enzymatic Nucleic Acid
cuccaucagccgaaaggcgagugaggucuaaucuugu

SEQ ID NO: 7906 - RNA, 37 nt, Artificial Sequence
  Description of Artificial Sequence:  Enzymatic Nucleic Acid
caccggaagccgaaaggcgagugaggucuggucucca

SEQ ID NO: 7907 - RNA, 37 nt, Artificial Sequence
  Description of Artificial Sequence:  Enzymatic Nucleic Acid
cuucagcagccgaaaggcgagugaggucucggaacgg

SEQ ID NO: 7908 - RNA, 37 nt, Artificial Sequence
  Description of Artificial Sequence:  Enzymatic Nucleic Acid
gccuucaggccgaaaggcgagugaggucuaccggaac

SEQ ID NO: 7909 - RNA, 37 nt, Artificial Sequence
  Description of Artificial Sequence:  Enzymatic Nucleic Acid
cgccuggggccgaaaggcgagugaggucucuucagca

SEQ ID NO: 7910 - RNA, 37 nt, Artificial Sequence
  Description of Artificial Sequence:  Enzymatic Nucleic Acid
gauauccggccgaaaggcgagugaggucucugggccu

SEQ ID NO: 7911 - RNA, 37 nt, Artificial Sequence
  Description of Artificial Sequence:  Enzymatic Nucleic Acid
gaaguccggccgaaaggcgagugaggucucuuguaga

SEQ ID NO: 7912 - RNA, 37 nt, Artificial Sequence
  Description of Artificial Sequence:  Enzymatic Nucleic Acid
ccucucaggccgaaaggcgagugaggucucuggaagu

SEQ ID NO: 7913 - RNA, 37 nt, Artificial Sequence
  Description of Artificial Sequence:  Enzymatic Nucleic Acid
cgggccuggccgaaaggcgagugaggucucucucagc

SEQ ID NO: 7914 - RNA, 37 nt, Artificial Sequence
  Description of Artificial Sequence:  Enzymatic Nucleic Acid
cucccggggccgaaaggcgagugaggucucugccucu

SEQ ID NO: 7915 - RNA, 37 nt, Artificial Sequence
  Description of Artificial Sequence:  Enzymatic Nucleic Acid
ucggccaggccgaaaggcgagugaggucuuucucccg

SEQ ID NO: 7916 - RNA, 37 nt, Artificial Sequence
  Description of Artificial Sequence:  Enzymatic Nucleic Acid
cuucucgggccgaaaggcgagugaggucucagcuucu

SEQ ID NO: 7917 - RNA, 37 nt, Artificial Sequence
  Description of Artificial Sequence:  Enzymatic Nucleic Acid
ugcaggaggccgaaaggcgagugaggucuuccuucuu

SEQ ID NO: 7918 - RNA, 37 nt, Artificial Sequence
  Description of Artificial Sequence:  Enzymatic Nucleic Acid
ugcuccuggccgaaaggcgagugaggucuaggagcuc

SEQ ID NO: 7919 - RNA, 37 nt, Artificial Sequence
  Description of Artificial Sequence:  Enzymatic Nucleic Acid
uccagcuggccgaaaggcgagugaggucuuccugcag

SEQ ID NO: 7920 - RNA, 37 nt, Artificial Sequence
  Description of Artificial Sequence:  Enzymatic Nucleic Acid
ugcuccaggccgaaaggcgagugaggucuugcuccug

SEQ ID NO: 7921 - RNA, 37 nt, Artificial Sequence
  Description of Artificial Sequence:  Enzymatic Nucleic Acid
ugcagcuggccgaaaggcgagugaggucuuccagcug

SEQ ID NO: 7922 - RNA, 37 nt, Artificial Sequence
  Description of Artificial Sequence:  Enzymatic Nucleic Acid
cucugcaggccgaaaggcgagugaggucuugcuccag

SEQ ID NO: 7923 - RNA, 37 nt, Artificial Sequence
  Description of Artificial Sequence:  Enzymatic Nucleic Acid
ucccucuggccgaaaggcgagugaggucuagcugcuc

SEQ ID NO: 7924 - RNA, 37 nt, Artificial Sequence
  Description of Artificial Sequence:  Enzymatic Nucleic Acid
uugcuguagccgaaaggcgagugaggucuucccucug

SEQ ID NO: 7925 - RNA, 37 nt, Artificial Sequence
  Description of Artificial Sequence:  Enzymatic Nucleic Acid
ucaguuuggccgaaaggcgagugaggucuuguacucc

SEQ ID NO: 7926 - RNA, 37 nt, Artificial Sequence
  Description of Artificial Sequence:  Enzymatic Nucleic Acid
acagcugggccgaaaggcgagugaggucucuucaguu

SEQ ID NO: 7927 - RNA, 37 nt, Artificial Sequence
  Description of Artificial Sequence:  Enzymatic Nucleic Acid
ccugacaggccgaaaggcgagugaggucuuggccuuc

SEQ ID NO: 7928 - RNA, 37 nt, Artificial Sequence
  Description of Artificial Sequence:  Enzymatic Nucleic Acid
acuccugagccgaaaggcgagugaggucuagcuggcc

SEQ ID NO: 7929 - RNA, 37 nt, Artificial Sequence
  Description of Artificial Sequence:  Enzymatic Nucleic Acid
cuggccgagccgaaaggcgagugaggucuuccugaca

SEQ ID NO: 7930 - RNA, 37 nt, Artificial Sequence
  Description of Artificial Sequence:  Enzymatic Nucleic Acid
gauccugggccgaaaggcgagugaggucucgacuccu

SEQ ID NO: 7931 - RNA, 37 nt, Artificial Sequence
  Description of Artificial Sequence:  Enzymatic Nucleic Acid
acaugccggccgaaaggcgagugaggucuuuccucau

SEQ ID NO: 7932 - RNA, 37 nt, Artificial Sequence
  Description of Artificial Sequence:  Enzymatic Nucleic Acid
ucgacauggccgaaaggcgagugaggucucgcuuccu

SEQ ID NO: 7933 - RNA, 37 nt, Artificial Sequence
  Description of Artificial Sequence:  Enzymatic Nucleic Acid
gaccucgagccgaaaggcgagugaggucuaugccgcu

SEQ ID NO: 7934 - RNA, 37 nt, Artificial Sequence
  Description of Artificial Sequence:  Enzymatic Nucleic Acid
cugggagagccgaaaggcgagugaggucucucgacau

SEQ ID NO: 7935 - RNA, 37 nt, Artificial Sequence
  Description of Artificial Sequence:  Enzymatic Nucleic Acid
caaggggggccgaaaggcgagugaggucucugggaga

SEQ ID NO: 7936 - RNA, 37 nt, Artificial Sequence
  Description of Artificial Sequence:  Enzymatic Nucleic Acid
gcgggggggccgaaaggcgagugaggucuaagggggc

SEQ ID NO: 7937 - RNA, 37 nt, Artificial Sequence
  Description of Artificial Sequence:  Enzymatic Nucleic Acid
ggcagggggccgaaaggcgagugaggucuggggggca

SEQ ID NO: 7938 - RNA, 37 nt, Artificial Sequence
  Description of Artificial Sequence:  Enzymatic Nucleic Acid
gagguagggccgaaaggcgagugaggucuaggggcgg

SEQ ID NO: 7939 - RNA, 37 nt, Artificial Sequence
  Description of Artificial Sequence:  Enzymatic Nucleic Acid
gggcaggggccgaaaggcgagugaggucucaggggag

SEQ ID NO: 7940 - RNA, 37 nt, Artificial Sequence
  Description of Artificial Sequence:  Enzymatic Nucleic Acid
uggcuggggccgaaaggcgagugaggucuagggccag

SEQ ID NO: 7941 - RNA, 37 nt, Artificial Sequence
  Description of Artificial Sequence:  Enzymatic Nucleic Acid
uccucugggccgaaaggcgagugaggucuugggcagg

SEQ ID NO: 7942 - RNA, 37 nt, Artificial Sequence
  Description of Artificial Sequence:  Enzymatic Nucleic Acid
cggggggggccgaaaggcgagugaggucuuccuccuc

SEQ ID NO: 7943 - RNA, 37 nt, Artificial Sequence
  Description of Artificial Sequence:  Enzymatic Nucleic Acid
ucaggugggccgaaaggcgagugaggucuuccucggg

SEQ ID NO: 7944 - RNA, 37 nt, Artificial Sequence
  Description of Artificial Sequence:  Enzymatic Nucleic Acid
ugggacaggccgaaaggcgagugaggucuagaaguca

SEQ ID NO: 7945 - RNA, 37 nt, Artificial Sequence
  Description of Artificial Sequence:  Enzymatic Nucleic Acid
acuugggagccgaaaggcgagugaggucuagcagaag

SEQ ID NO: 7946 - RNA, 37 nt, Artificial Sequence
  Description of Artificial Sequence:  Enzymatic Nucleic Acid
uacuggcagccgaaaggcgagugaggucuuugggaca

SEQ ID NO: 7947 - RNA, 37 nt, Artificial Sequence
  Description of Artificial Sequence:  Enzymatic Nucleic Acid
gauacugggccgaaaggcgagugaggucuacuuggga

SEQ ID NO: 7948 - RNA, 37 nt, Artificial Sequence
  Description of Artificial Sequence:  Enzymatic Nucleic Acid
gccugauagccgaaaggcgagugaggucuuggcacuu

SEQ ID NO: 7949 - RNA, 37 nt, Artificial Sequence
  Description of Artificial Sequence:  Enzymatic Nucleic Acid
aucagggggccgaaaggcgagugaggucucugauacu

SEQ ID NO: 7950 - RNA, 37 nt, Artificial Sequence
  Description of Artificial Sequence:  Enzymatic Nucleic Acid
uguaucuggccgaaaggcgagugaggucuaggguguc

SEQ ID NO: 7951 - RNA, 37 nt, Artificial Sequence
  Description of Artificial Sequence:  Enzymatic Nucleic Acid
cuccaugagccgaaaggcgagugaggucuauguaucu

SEQ ID NO: 7952 - RNA, 37 nt, Artificial Sequence
  Description of Artificial Sequence:  Enzymatic Nucleic Acid
ucaaugcagccgaaaggcgagugaggucuuccaugac

SEQ ID NO: 7953 - RNA, 37 nt, Artificial Sequence
  Description of Artificial Sequence:  Enzymatic Nucleic Acid
acucaauggccgaaaggcgagugaggucuacuccaug

SEQ ID NO: 7954 - RNA, 37 nt, Artificial Sequence
  Description of Artificial Sequence:  Enzymatic Nucleic Acid
cggcccuagccgaaaggcgagugaggucuucaaugca

SEQ ID NO: 7955 - RNA, 37 nt, Artificial Sequence
  Description of Artificial Sequence:  Enzymatic Nucleic Acid
cuggccgggccgaaaggcgagugaggucuccuacuca

SEQ ID NO: 7956 - RNA, 37 nt, Artificial Sequence
  Description of Artificial Sequence:  Enzymatic Nucleic Acid
ugcacugggccgaaaggcgagugaggucucggcccua

SEQ ID NO: 7957 - RNA, 37 nt, Artificial Sequence
  Description of Artificial Sequence:  Enzymatic Nucleic Acid
gccuugcagccgaaaggcgagugaggucuuggccggc

SEQ ID NO: 7958 - RNA, 37 nt, Artificial Sequence
  Description of Artificial Sequence:  Enzymatic Nucleic Acid
uggccuuggccgaaaggcgagugaggucuacuggccg

SEQ ID NO: 7959 - RNA, 37 nt, Artificial Sequence
  Description of Artificial Sequence:  Enzymatic Nucleic Acid
ggcagugggccgaaaggcgagugaggucucuugcacu

SEQ ID NO: 7960 - RNA, 37 nt, Artificial Sequence
  Description of Artificial Sequence:  Enzymatic Nucleic Acid
cgggcagggccgaaaggcgagugaggucuaguggccu

SEQ ID NO: 7961 - RNA, 37 nt, Artificial Sequence
  Description of Artificial Sequence:  Enzymatic Nucleic Acid
uccucggggccgaaaggcgagugaggucuaggcagug

SEQ ID NO: 7962 - RNA, 37 nt, Artificial Sequence
  Description of Artificial Sequence:  Enzymatic Nucleic Acid
cccgggcagccgaaaggcgagugaggucuguccucgg

SEQ ID NO: 7963 - RNA, 37 nt, Artificial Sequence
  Description of Artificial Sequence:  Enzymatic Nucleic Acid
gucccggggccgaaaggcgagugaggucuacguccuc

SEQ ID NO: 7964 - RNA, 37 nt, Artificial Sequence
  Description of Artificial Sequence:  Enzymatic Nucleic Acid
agacugcagccgaaaggcgagugaggucuggucccgg

SEQ ID NO: 7965 - RNA, 37 nt, Artificial Sequence
  Description of Artificial Sequence:  Enzymatic Nucleic Acid
gcagacuggccgaaaggcgagugaggucuacgguccc

SEQ ID NO: 7966 - RNA, 37 nt, Artificial Sequence
  Description of Artificial Sequence:  Enzymatic Nucleic Acid
agcgcagagccgaaaggcgagugaggucuugcacggu

SEQ ID NO: 7967 - RNA, 37 nt, Artificial Sequence
  Description of Artificial Sequence:  Enzymatic Nucleic Acid
ggaaagcggccgaaaggcgagugaggucuagacugca

SEQ ID NO: 7968 - RNA, 37 nt, Artificial Sequence
  Description of Artificial Sequence:  Enzymatic Nucleic Acid
gaggaaaggccgaaaggcgagugaggucugcagacug

SEQ ID NO: 7969 - RNA, 37 nt, Artificial Sequence
  Description of Artificial Sequence:  Enzymatic Nucleic Acid
uaggcagggccgaaaggcgagugaggucugggagagg

SEQ ID NO: 7970 - RNA, 37 nt, Artificial Sequence
  Description of Artificial Sequence:  Enzymatic Nucleic Acid
gggcuagggccgaaaggcgagugaggucuaggcggga

SEQ ID NO: 7971 - RNA, 37 nt, Artificial Sequence
  Description of Artificial Sequence:  Enzymatic Nucleic Acid
auccuggggccgaaaggcgagugaggucuuaggcagg

SEQ ID NO: 7972 - RNA, 37 nt, Artificial Sequence
  Description of Artificial Sequence:  Enzymatic Nucleic Acid
ccacccaggccgaaaggcgagugaggucuccuucauc

SEQ ID NO: 7973 - RNA, 37 nt, Artificial Sequence
  Description of Artificial Sequence:  Enzymatic Nucleic Acid
uguggccagccgaaaggcgagugaggucuccagcccu

SEQ ID NO: 7974 - RNA, 37 nt, Artificial Sequence
  Description of Artificial Sequence:  Enzymatic Nucleic Acid
aguugugggccgaaaggcgagugaggucucacccagc

SEQ ID NO: 7975 - RNA, 37 nt, Artificial Sequence
  Description of Artificial Sequence:  Enzymatic Nucleic Acid
ccaggugggccgaaaggcgagugaggucuaucccagu

SEQ ID NO: 7976 - RNA, 37 nt, Artificial Sequence
  Description of Artificial Sequence:  Enzymatic Nucleic Acid
gggugggggccgaaaggcgagugaggucuuccaggug

SEQ ID NO: 7977 - RNA, 37 nt, Artificial Sequence
  Description of Artificial Sequence:  Enzymatic Nucleic Acid
gcggccaggccgaaaggcgagugaggucuuccugggu

SEQ ID NO: 7978 - RNA, 37 nt, Artificial Sequence
  Description of Artificial Sequence:  Enzymatic Nucleic Acid
ugccgcgggccgaaaggcgagugaggucucagcuccu

SEQ ID NO: 7979 - RNA, 37 nt, Artificial Sequence
  Description of Artificial Sequence:  Enzymatic Nucleic Acid
aggugccggccgaaaggcgagugaggucuggccagcu

SEQ ID NO: 7980 - RNA, 37 nt, Artificial Sequence
  Description of Artificial Sequence:  Enzymatic Nucleic Acid
guaagguggccgaaaggcgagugaggucucgcggcca

SEQ ID NO: 7981 - RNA, 37 nt, Artificial Sequence
  Description of Artificial Sequence:  Enzymatic Nucleic Acid
agcugaaggccgaaaggcgagugaggucuguaaggug

SEQ ID NO: 7982 - RNA, 37 nt, Artificial Sequence
  Description of Artificial Sequence:  Enzymatic Nucleic Acid
aucaacaggccgaaaggcgagugaggucuugaagcgu

SEQ ID NO: 7983 - RNA, 37 nt, Artificial Sequence
  Description of Artificial Sequence:  Enzymatic Nucleic Acid
cggaucaagccgaaaggcgagugaggucuagcugaag

SEQ ID NO: 7984 - RNA, 37 nt, Artificial Sequence
  Description of Artificial Sequence:  Enzymatic Nucleic Acid
gggaccaggccgaaaggcgagugaggucuggaucaac

SEQ ID NO: 7985 - RNA, 37 nt, Artificial Sequence
  Description of Artificial Sequence:  Enzymatic Nucleic Acid
agaggggagccgaaaggcgagugaggucucagcggau

SEQ ID NO: 7986 - RNA, 37 nt, Artificial Sequence
  Description of Artificial Sequence:  Enzymatic Nucleic Acid
cgcaucuagccgaaaggcgagugaggucucccaaaag

SEQ ID NO: 7987 - RNA, 37 nt, Artificial Sequence
  Description of Artificial Sequence:  Enzymatic Nucleic Acid
cggggccggccgaaaggcgagugaggucuaucuaccc

SEQ ID NO: 7988 - RNA, 37 nt, Artificial Sequence
  Description of Artificial Sequence:  Enzymatic Nucleic Acid
gaucgggggccgaaaggcgagugaggucucgcaucua

SEQ ID NO: 7989 - RNA, 37 nt, Artificial Sequence
  Description of Artificial Sequence:  Enzymatic Nucleic Acid
gagucagggccgaaaggcgagugaggucucugaucgg

SEQ ID NO: 7990 - RNA, 37 nt, Artificial Sequence
  Description of Artificial Sequence:  Enzymatic Nucleic Acid
aagagcaggccgaaaggcgagugaggucugagucagg

SEQ ID NO: 7991 - RNA, 37 nt, Artificial Sequence
  Description of Artificial Sequence:  Enzymatic Nucleic Acid
aaaaagaggccgaaaggcgagugaggucuagcgaguc

SEQ ID NO: 7992 - RNA, 37 nt, Artificial Sequence
  Description of Artificial Sequence:  Enzymatic Nucleic Acid
gaagggaagccgaaaggcgagugaggucuaaaaagag

SEQ ID NO: 7993 - RNA, 37 nt, Artificial Sequence
  Description of Artificial Sequence:  Enzymatic Nucleic Acid
cgagcagagccgaaaggcgagugaggucuagaaggga

SEQ ID NO: 7994 - RNA, 37 nt, Artificial Sequence
  Description of Artificial Sequence:  Enzymatic Nucleic Acid
gguucgaggccgaaaggcgagugaggucuagacagaa

SEQ ID NO: 7995 - RNA, 37 nt, Artificial Sequence
  Description of Artificial Sequence:  Enzymatic Nucleic Acid
gcccgagggccgaaaggcgagugaggucuaagugguu

SEQ ID NO: 7996 - RNA, 37 nt, Artificial Sequence
  Description of Artificial Sequence:  Enzymatic Nucleic Acid
gggauuaggccgaaaggcgagugaggucuccgaggca

SEQ ID NO: 7997 - RNA, 37 nt, Artificial Sequence
  Description of Artificial Sequence:  Enzymatic Nucleic Acid
ccccaguggccgaaaggcgagugaggucucgggugga

SEQ ID NO: 7998 - RNA, 37 nt, Artificial Sequence
  Description of Artificial Sequence:  Enzymatic Nucleic Acid
auucuugagccgaaaggcgagugaggucuuuccccag

SEQ ID NO: 7999 - RNA, 37 nt, Artificial Sequence
  Description of Artificial Sequence:  Enzymatic Nucleic Acid
gccccagggccgaaaggcgagugaggucucccauucu

SEQ ID NO: 8000 - RNA, 37 nt, Artificial Sequence
  Description of Artificial Sequence:  Enzymatic Nucleic Acid
ccugagaggccgaaaggcgagugaggucucccaggcc

SEQ ID NO: 8001 - RNA, 37 nt, Artificial Sequence
  Description of Artificial Sequence:  Enzymatic Nucleic Acid
aggggaaggccgaaaggcgagugaggucuaguucucc

SEQ ID NO: 8002 - RNA, 37 nt, Artificial Sequence
  Description of Artificial Sequence:  Enzymatic Nucleic Acid
cagcucuggccgaaaggcgagugaggucucaggggaa

SEQ ID NO: 8003 - RNA, 37 nt, Artificial Sequence
  Description of Artificial Sequence:  Enzymatic Nucleic Acid
ccacccaggccgaaaggcgagugaggucuucugccag

SEQ ID NO: 8004 - RNA, 37 nt, Artificial Sequence
  Description of Artificial Sequence:  Enzymatic Nucleic Acid
agcugccagccgaaaggcgagugaggucuccagcucu

SEQ ID NO: 8005 - RNA, 37 nt, Artificial Sequence
  Description of Artificial Sequence:  Enzymatic Nucleic Acid
aagagcuggccgaaaggcgagugaggucucacccagc

SEQ ID NO: 8006 - RNA, 37 nt, Artificial Sequence
  Description of Artificial Sequence:  Enzymatic Nucleic Acid
aggaagaggccgaaaggcgagugaggucuugccaccc

SEQ ID NO: 8007 - RNA, 37 nt, Artificial Sequence
  Description of Artificial Sequence:  Enzymatic Nucleic Acid
gcggcggggccgaaaggcgagugaggucugggucggu

SEQ ID NO: 8008 - RNA, 37 nt, Artificial Sequence
  Description of Artificial Sequence:  Enzymatic Nucleic Acid
cacagcgggccgaaaggcgagugaggucugggcgggu

SEQ ID NO: 8009 - RNA, 37 nt, Artificial Sequence
  Description of Artificial Sequence:  Enzymatic Nucleic Acid
gggcacaggccgaaaggcgagugaggucuggcgggcg

SEQ ID NO: 8010 - RNA, 37 nt, Artificial Sequence
  Description of Artificial Sequence:  Enzymatic Nucleic Acid
ccagggcagccgaaaggcgagugaggucuagcggcgg

SEQ ID NO: 8011 - RNA, 37 nt, Artificial Sequence
  Description of Artificial Sequence:  Enzymatic Nucleic Acid
ucccaggggccgaaaggcgagugaggucuacagcggc

SEQ ID NO: 8012 - RNA, 37 nt, Artificial Sequence
  Description of Artificial Sequence:  Enzymatic Nucleic Acid
gggcagcagccgaaaggcgagugaggucuucccaggg

SEQ ID NO: 8013 - RNA, 37 nt, Artificial Sequence
  Description of Artificial Sequence:  Enzymatic Nucleic Acid
gagggcaggccgaaaggcgagugaggucuacucccag

SEQ ID NO: 8014 - RNA, 37 nt, Artificial Sequence
  Description of Artificial Sequence:  Enzymatic Nucleic Acid
uaagaggggccgaaaggcgagugaggucuagcacucc

SEQ ID NO: 8015 - RNA, 37 nt, Artificial Sequence
  Description of Artificial Sequence:  Enzymatic Nucleic Acid
cccguguggccgaaaggcgagugaggucuaugguaag

SEQ ID NO: 8016 - RNA, 37 nt, Artificial Sequence
  Description of Artificial Sequence:  Enzymatic Nucleic Acid
ggagagcagccgaaaggcgagugaggucuccgugugc

SEQ ID NO: 8017 - RNA, 37 nt, Artificial Sequence
  Description of Artificial Sequence:  Enzymatic Nucleic Acid
aaggagaggccgaaaggcgagugaggucuacccgugu

SEQ ID NO: 8018 - RNA, 37 nt, Artificial Sequence
  Description of Artificial Sequence:  Enzymatic Nucleic Acid
gcaugcaggccgaaaggcgagugaggucuccaaaagg

SEQ ID NO: 8019 - RNA, 37 nt, Artificial Sequence
  Description of Artificial Sequence:  Enzymatic Nucleic Acid
auagcauggccgaaaggcgagugaggucuagcccaaa

SEQ ID NO: 8020 - RNA, 37 nt, Artificial Sequence
  Description of Artificial Sequence:  Enzymatic Nucleic Acid
uggaauaggccgaaaggcgagugaggucuaugcagcc

SEQ ID NO: 8021 - RNA, 37 nt, Artificial Sequence
  Description of Artificial Sequence:  Enzymatic Nucleic Acid
ucuggcuggccgaaaggcgagugaggucuaaaaugga

SEQ ID NO: 8022 - RNA, 37 nt, Artificial Sequence
  Description of Artificial Sequence:  Enzymatic Nucleic Acid
cggucugggccgaaaggcgagugaggucuugcaaaau

SEQ ID NO: 8023 - RNA, 37 nt, Artificial Sequence
  Description of Artificial Sequence:  Enzymatic Nucleic Acid
uaaauacagccgaaaggcgagugaggucuaucggucu

SEQ ID NO: 8024 - RNA, 37 nt, Artificial Sequence
  Description of Artificial Sequence:  Enzymatic Nucleic Acid
guuaaauagccgaaaggcgagugaggucuacaucggu

SEQ ID NO: 8025 - RNA, 37 nt, Artificial Sequence
  Description of Artificial Sequence:  Enzymatic Nucleic Acid
aauagugagccgaaaggcgagugaggucuugguuaaa

SEQ ID NO: 8026 - RNA, 37 nt, Artificial Sequence
  Description of Artificial Sequence:  Enzymatic Nucleic Acid
ggaaacaagccgaaaggcgagugaggucuccaaaugu

SEQ ID NO: 8027 - RNA, 37 nt, Artificial Sequence
  Description of Artificial Sequence:  Enzymatic Nucleic Acid
augggaaagccgaaaggcgagugaggucuaacccaaa

SEQ ID NO: 8028 - RNA, 37 nt, Artificial Sequence
  Description of Artificial Sequence:  Enzymatic Nucleic Acid
uaugguaagccgaaaggcgagugaggucuaaaaagau

SEQ ID NO: 8029 - RNA, 37 nt, Artificial Sequence
  Description of Artificial Sequence:  Enzymatic Nucleic Acid
uuacuauggccgaaaggcgagugaggucucauuauuu

SEQ ID NO: 8030 - RNA, 37 nt, Artificial Sequence
  Description of Artificial Sequence:  Enzymatic Nucleic Acid
uuuuuuuagccgaaaggcgagugaggucuuaugccau

SEQ ID NO: 8031 - DNA, 31 bp, Artificial Sequence
  Description of Artificial Sequence:  Enzymatic Nucleic Acid
aagggccaggctagctacaacgagctcgtgc

SEQ ID NO: 8032 - DNA, 31 bp, Artificial Sequence
  Description of Artificial Sequence:  Enzymatic Nucleic Acid
cacaagggggctagctacaacgacatgctcg

SEQ ID NO: 8033 - DNA, 31 bp, Artificial Sequence
  Description of Artificial Sequence:  Enzymatic Nucleic Acid
ctggatcaggctagctacaacgaaagggcca

SEQ ID NO: 8034 - DNA, 31 bp, Artificial Sequence
  Description of Artificial Sequence:  Enzymatic Nucleic Acid
cacctggaggctagctacaacgacacaaggg

SEQ ID NO: 8035 - DNA, 31 bp, Artificial Sequence
  Description of Artificial Sequence:  Enzymatic Nucleic Acid
tttccccaggctagctacaacgactggatca

SEQ ID NO: 8036 - DNA, 31 bp, Artificial Sequence
  Description of Artificial Sequence:  Enzymatic Nucleic Acid
ggccttagggctagctacaacgattccccac

SEQ ID NO: 8037 - DNA, 31 bp, Artificial Sequence
  Description of Artificial Sequence:  Enzymatic Nucleic Acid
tctctgggggctagctacaacgacttagttt

SEQ ID NO: 8038 - DNA, 31 bp, Artificial Sequence
  Description of Artificial Sequence:  Enzymatic Nucleic Acid
ggtcctcaggctagctacaacgattctctgg

SEQ ID NO: 8039 - DNA, 31 bp, Artificial Sequence
  Description of Artificial Sequence:  Enzymatic Nucleic Acid
ctgcggggggctagctacaacgacctcactt

SEQ ID NO: 8040 - DNA, 31 bp, Artificial Sequence
  Description of Artificial Sequence:  Enzymatic Nucleic Acid
atagtctgggctagctacaacgaggggtcct

SEQ ID NO: 8041 - DNA, 31 bp, Artificial Sequence
  Description of Artificial Sequence:  Enzymatic Nucleic Acid
attgatagggctagctacaacgactgcgggg

SEQ ID NO: 8042 - DNA, 31 bp, Artificial Sequence
  Description of Artificial Sequence:  Enzymatic Nucleic Acid
gggattgaggctagctacaacgaagtctgcg

SEQ ID NO: 8043 - DNA, 31 bp, Artificial Sequence
  Description of Artificial Sequence:  Enzymatic Nucleic Acid
gactgggaggctagctacaacgatgatagtc

SEQ ID NO: 8044 - DNA, 31 bp, Artificial Sequence
  Description of Artificial Sequence:  Enzymatic Nucleic Acid
ggaagagaggctagctacaacgatgggattg

SEQ ID NO: 8045 - DNA, 31 bp, Artificial Sequence
  Description of Artificial Sequence:  Enzymatic Nucleic Acid
acagggagggctagctacaacgagaggggaa

SEQ ID NO: 8046 - DNA, 31 bp, Artificial Sequence
  Description of Artificial Sequence:  Enzymatic Nucleic Acid
gagcttcaggctagctacaacgaagggagtg

SEQ ID NO: 8047 - DNA, 31 bp, Artificial Sequence
  Description of Artificial Sequence:  Enzymatic Nucleic Acid
ctggagagggctagctacaacgattcacagg

SEQ ID NO: 8048 - DNA, 31 bp, Artificial Sequence
  Description of Artificial Sequence:  Enzymatic Nucleic Acid
cgatgatgggctagctacaacgatggagagc

SEQ ID NO: 8049 - DNA, 31 bp, Artificial Sequence
  Description of Artificial Sequence:  Enzymatic Nucleic Acid
ctcgatgaggctagctacaacgagctggaga

SEQ ID NO: 8050 - DNA, 31 bp, Artificial Sequence
  Description of Artificial Sequence:  Enzymatic Nucleic Acid
gacctcgaggctagctacaacgagatgctgg

SEQ ID NO: 8051 - DNA, 31 bp, Artificial Sequence
  Description of Artificial Sequence:  Enzymatic Nucleic Acid
tgatgggaggctagctacaacgactcgatga

SEQ ID NO: 8052 - DNA, 31 bp, Artificial Sequence
  Description of Artificial Sequence:  Enzymatic Nucleic Acid
agggctgaggctagctacaacgagggacctc

SEQ ID NO: 8053 - DNA, 31 bp, Artificial Sequence
  Description of Artificial Sequence:  Enzymatic Nucleic Acid
ggcaagggggctagctacaacgatgatggga

SEQ ID NO: 8054 - DNA, 31 bp, Artificial Sequence
  Description of Artificial Sequence:  Enzymatic Nucleic Acid
caacagggggctagctacaacgaaagggctg

SEQ ID NO: 8055 - DNA, 31 bp, Artificial Sequence
  Description of Artificial Sequence:  Enzymatic Nucleic Acid
tcatccaaggctagctacaacgaagggcaag

SEQ ID NO: 8056 - DNA, 31 bp, Artificial Sequence
  Description of Artificial Sequence:  Enzymatic Nucleic Acid
cctattcaggctagctacaacgaccaacagg

SEQ ID NO: 8057 - DNA, 31 bp, Artificial Sequence
  Description of Artificial Sequence:  Enzymatic Nucleic Acid
ggtgcctaggctagctacaacgatcatccaa

SEQ ID NO: 8058 - DNA, 31 bp, Artificial Sequence
  Description of Artificial Sequence:  Enzymatic Nucleic Acid
cagaggtgggctagctacaacgactattcat

SEQ ID NO: 8059 - DNA, 31 bp, Artificial Sequence
  Description of Artificial Sequence:  Enzymatic Nucleic Acid
tccagaggggctagctacaacgagcctattc

SEQ ID NO: 8060 - DNA, 31 bp, Artificial Sequence
  Description of Artificial Sequence:  Enzymatic Nucleic Acid
acagttggggctagctacaacgatcttccag

SEQ ID NO: 8061 - DNA, 31 bp, Artificial Sequence
  Description of Artificial Sequence:  Enzymatic Nucleic Acid
tcacacagggctagctacaacgatggctctt

SEQ ID NO: 8062 - DNA, 31 bp, Artificial Sequence
  Description of Artificial Sequence:  Enzymatic Nucleic Acid
atctcacaggctagctacaacgaagttggct

SEQ ID NO: 8063 - DNA, 31 bp, Artificial Sequence
  Description of Artificial Sequence:  Enzymatic Nucleic Acid
ccatctcaggctagctacaacgaacagttgg

SEQ ID NO: 8064 - DNA, 31 bp, Artificial Sequence
  Description of Artificial Sequence:  Enzymatic Nucleic Acid
ctgcaccaggctagctacaacgactcacaca

SEQ ID NO: 8065 - DNA, 31 bp, Artificial Sequence
  Description of Artificial Sequence:  Enzymatic Nucleic Acid
gggctgcaggctagctacaacgacatctcac

SEQ ID NO: 8066 - DNA, 31 bp, Artificial Sequence
  Description of Artificial Sequence:  Enzymatic Nucleic Acid
ctgggctgggctagctacaacgaaccatctc

SEQ ID NO: 8067 - DNA, 31 bp, Artificial Sequence
  Description of Artificial Sequence:  Enzymatic Nucleic Acid
ccactgggggctagctacaacgatgcaccat

SEQ ID NO: 8068 - DNA, 31 bp, Artificial Sequence
  Description of Artificial Sequence:  Enzymatic Nucleic Acid
ggccaccaggctagctacaacgatgggctgc

SEQ ID NO: 8069 - DNA, 31 bp, Artificial Sequence
  Description of Artificial Sequence:  Enzymatic Nucleic Acid
ccgggccaggctagctacaacgacactgggc

SEQ ID NO: 8070 - DNA, 31 bp, Artificial Sequence
  Description of Artificial Sequence:  Enzymatic Nucleic Acid
ctgccgggggctagctacaacgacaccactg

SEQ ID NO: 8071 - DNA, 31 bp, Artificial Sequence
  Description of Artificial Sequence:  Enzymatic Nucleic Acid
atctgctgggctagctacaacgacgggccac

SEQ ID NO: 8072 - DNA, 31 bp, Artificial Sequence
  Description of Artificial Sequence:  Enzymatic Nucleic Acid
ctgatctgggctagctacaacgatgccgggc

SEQ ID NO: 8073 - DNA, 31 bp, Artificial Sequence
  Description of Artificial Sequence:  Enzymatic Nucleic Acid
cgtcctgaggctagctacaacgactgctgcc

SEQ ID NO: 8074 - DNA, 31 bp, Artificial Sequence
  Description of Artificial Sequence:  Enzymatic Nucleic Acid
ccagtacgggctagctacaacgacctgatct

SEQ ID NO: 8075 - DNA, 31 bp, Artificial Sequence
  Description of Artificial Sequence:  Enzymatic Nucleic Acid
gcccagtaggctagctacaacgagtcctgat

SEQ ID NO: 8076 - DNA, 31 bp, Artificial Sequence
  Description of Artificial Sequence:  Enzymatic Nucleic Acid
tcgcccagggctagctacaacgaacgtcctg

SEQ ID NO: 8077 - DNA, 31 bp, Artificial Sequence
  Description of Artificial Sequence:  Enzymatic Nucleic Acid
actcttcgggctagctacaacgaccagtacg

SEQ ID NO: 8078 - DNA, 31 bp, Artificial Sequence
  Description of Artificial Sequence:  Enzymatic Nucleic Acid
agaggagaggctagctacaacgatcttcgcc

SEQ ID NO: 8079 - DNA, 31 bp, Artificial Sequence
  Description of Artificial Sequence:  Enzymatic Nucleic Acid
atggctggggctagctacaacgattccccag

SEQ ID NO: 8080 - DNA, 31 bp, Artificial Sequence
  Description of Artificial Sequence:  Enzymatic Nucleic Acid
cagcatggggctagctacaacgatggcttcc

SEQ ID NO: 8081 - DNA, 31 bp, Artificial Sequence
  Description of Artificial Sequence:  Enzymatic Nucleic Acid
gtgcagcaggctagctacaacgaggctggct

SEQ ID NO: 8082 - DNA, 31 bp, Artificial Sequence
  Description of Artificial Sequence:  Enzymatic Nucleic Acid
aggtgcagggctagctacaacgaatggctgg

SEQ ID NO: 8083 - DNA, 31 bp, Artificial Sequence
  Description of Artificial Sequence:  Enzymatic Nucleic Acid
ggcaggtgggctagctacaacgaagcatggc

SEQ ID NO: 8084 - DNA, 31 bp, Artificial Sequence
  Description of Artificial Sequence:  Enzymatic Nucleic Acid
aaggcaggggctagctacaacgagcagcatg

SEQ ID NO: 8085 - DNA, 31 bp, Artificial Sequence
  Description of Artificial Sequence:  Enzymatic Nucleic Acid
tctgaaggggctagctacaacgaaggtgcag

SEQ ID NO: 8086 - DNA, 31 bp, Artificial Sequence
  Description of Artificial Sequence:  Enzymatic Nucleic Acid
gcgccctgggctagctacaacgatctgaagg

SEQ ID NO: 8087 - DNA, 31 bp, Artificial Sequence
  Description of Artificial Sequence:  Enzymatic Nucleic Acid
caggagcgggctagctacaacgacctgttct

SEQ ID NO: 8088 - DNA, 31 bp, Artificial Sequence
  Description of Artificial Sequence:  Enzymatic Nucleic Acid
ctcaggagggctagctacaacgagccctgtt

SEQ ID NO: 8089 - DNA, 31 bp, Artificial Sequence
  Description of Artificial Sequence:  Enzymatic Nucleic Acid
ctggagggggctagctacaacgactcaggag

SEQ ID NO: 8090 - DNA, 31 bp, Artificial Sequence
  Description of Artificial Sequence:  Enzymatic Nucleic Acid
aggcagcgggctagctacaacgatggagggt

SEQ ID NO: 8091 - DNA, 31 bp, Artificial Sequence
  Description of Artificial Sequence:  Enzymatic Nucleic Acid
ccaggcagggctagctacaacgagctggagg

SEQ ID NO: 8092 - DNA, 31 bp, Artificial Sequence
  Description of Artificial Sequence:  Enzymatic Nucleic Acid
cctccaggggctagctacaacgaagcgctgg

SEQ ID NO: 8093 - DNA, 31 bp, Artificial Sequence
  Description of Artificial Sequence:  Enzymatic Nucleic Acid
gctcttgaggctagctacaacgatctcctcc

SEQ ID NO: 8094 - DNA, 31 bp, Artificial Sequence
  Description of Artificial Sequence:  Enzymatic Nucleic Acid
tctcggagggctagctacaacgatcttgatt

SEQ ID NO: 8095 - DNA, 31 bp, Artificial Sequence
  Description of Artificial Sequence:  Enzymatic Nucleic Acid
ggatggcaggctagctacaacgactcggagc

SEQ ID NO: 8096 - DNA, 31 bp, Artificial Sequence
  Description of Artificial Sequence:  Enzymatic Nucleic Acid
ccggatggggctagctacaacgaatctcgga

SEQ ID NO: 8097 - DNA, 31 bp, Artificial Sequence
  Description of Artificial Sequence:  Enzymatic Nucleic Acid
ctgccggaggctagctacaacgaggcatctc

SEQ ID NO: 8098 - DNA, 31 bp, Artificial Sequence
  Description of Artificial Sequence:  Enzymatic Nucleic Acid
ttgctctgggctagctacaacgacggatggc

SEQ ID NO: 8099 - DNA, 31 bp, Artificial Sequence
  Description of Artificial Sequence:  Enzymatic Nucleic Acid
tctggttgggctagctacaacgatctgccgg

SEQ ID NO: 8100 - DNA, 31 bp, Artificial Sequence
  Description of Artificial Sequence:  Enzymatic Nucleic Acid
gaatctggggctagctacaacgatgctctgc

SEQ ID NO: 8101 - DNA, 31 bp, Artificial Sequence
  Description of Artificial Sequence:  Enzymatic Nucleic Acid
ccgcagaaggctagctacaacgactggttgc

SEQ ID NO: 8102 - DNA, 31 bp, Artificial Sequence
  Description of Artificial Sequence:  Enzymatic Nucleic Acid
cgctcccgggctagctacaacgaagaatctg

SEQ ID NO: 8103 - DNA, 31 bp, Artificial Sequence
  Description of Artificial Sequence:  Enzymatic Nucleic Acid
tcgcagcgggctagctacaacgatcccgcag

SEQ ID NO: 8104 - DNA, 31 bp, Artificial Sequence
  Description of Artificial Sequence:  Enzymatic Nucleic Acid
cctcgcagggctagctacaacgagctcccgc

SEQ ID NO: 8105 - DNA, 31 bp, Artificial Sequence
  Description of Artificial Sequence:  Enzymatic Nucleic Acid
gctcctcgggctagctacaacgaagcgctcc

SEQ ID NO: 8106 - DNA, 31 bp, Artificial Sequence
  Description of Artificial Sequence:  Enzymatic Nucleic Acid
tgcagaagggctagctacaacgatcctcgca

SEQ ID NO: 8107 - DNA, 31 bp, Artificial Sequence
  Description of Artificial Sequence:  Enzymatic Nucleic Acid
tggaaatgggctagctacaacgaagaagctc

SEQ ID NO: 8108 - DNA, 31 bp, Artificial Sequence
  Description of Artificial Sequence:  Enzymatic Nucleic Acid
cttggaaaggctagctacaacgagcagaagc

SEQ ID NO: 8109 - DNA, 31 bp, Artificial Sequence
  Description of Artificial Sequence:  Enzymatic Nucleic Acid
ctggctggggctagctacaacgattggaaat

SEQ ID NO: 8110 - DNA, 31 bp, Artificial Sequence
  Description of Artificial Sequence:  Enzymatic Nucleic Acid
ccctctggggctagctacaacgatggcttgg

SEQ ID NO: 8111 - DNA, 31 bp, Artificial Sequence
  Description of Artificial Sequence:  Enzymatic Nucleic Acid
atgaggaaggctagctacaacgatccttctc

SEQ ID NO: 8112 - DNA, 31 bp, Artificial Sequence
  Description of Artificial Sequence:  Enzymatic Nucleic Acid
cttgcacaggctagctacaacgagaggaact

SEQ ID NO: 8113 - DNA, 31 bp, Artificial Sequence
  Description of Artificial Sequence:  Enzymatic Nucleic Acid
aacttgcaggctagctacaacgaatgaggaa

SEQ ID NO: 8114 - DNA, 31 bp, Artificial Sequence
  Description of Artificial Sequence:  Enzymatic Nucleic Acid
ggaacttgggctagctacaacgaacatgagg

SEQ ID NO: 8115 - DNA, 31 bp, Artificial Sequence
  Description of Artificial Sequence:  Enzymatic Nucleic Acid
tcctggaaggctagctacaacgattgcacat

SEQ ID NO: 8116 - DNA, 31 bp, Artificial Sequence
  Description of Artificial Sequence:  Enzymatic Nucleic Acid
tttcctggggctagctacaacgactcctgga

SEQ ID NO: 8117 - DNA, 31 bp, Artificial Sequence
  Description of Artificial Sequence:  Enzymatic Nucleic Acid
tccaccagggctagctacaacgattcctggc

SEQ ID NO: 8118 - DNA, 31 bp, Artificial Sequence
  Description of Artificial Sequence:  Enzymatic Nucleic Acid
tctctccaggctagctacaacgacagtttcc

SEQ ID NO: 8119 - DNA, 31 bp, Artificial Sequence
  Description of Artificial Sequence:  Enzymatic Nucleic Acid
aggccgagggctagctacaacgactctccac

SEQ ID NO: 8120 - DNA, 31 bp, Artificial Sequence
  Description of Artificial Sequence:  Enzymatic Nucleic Acid
tctccaggggctagctacaacgacgagtctc

SEQ ID NO: 8121 - DNA, 31 bp, Artificial Sequence
  Description of Artificial Sequence:  Enzymatic Nucleic Acid
agatcgagggctagctacaacgattctccag

SEQ ID NO: 8122 - DNA, 31 bp, Artificial Sequence
  Description of Artificial Sequence:  Enzymatic Nucleic Acid
tcttcagaggctagctacaacgacgagcttc

SEQ ID NO: 8123 - DNA, 31 bp, Artificial Sequence
  Description of Artificial Sequence:  Enzymatic Nucleic Acid
tccttctgggctagctacaacgactcttcag

SEQ ID NO: 8124 - DNA, 31 bp, Artificial Sequence
  Description of Artificial Sequence:  Enzymatic Nucleic Acid
agagcctgggctagctacaacgatccttctg

SEQ ID NO: 8125 - DNA, 31 bp, Artificial Sequence
  Description of Artificial Sequence:  Enzymatic Nucleic Acid
ccgcagagggctagctacaacgactgctcct

SEQ ID NO: 8126 - DNA, 31 bp, Artificial Sequence
  Description of Artificial Sequence:  Enzymatic Nucleic Acid
acctcccgggctagctacaacgaagagcctg

SEQ ID NO: 8127 - DNA, 31 bp, Artificial Sequence
  Description of Artificial Sequence:  Enzymatic Nucleic Acid
gtgctccaggctagctacaacgactcccgca

SEQ ID NO: 8128 - DNA, 31 bp, Artificial Sequence
  Description of Artificial Sequence:  Enzymatic Nucleic Acid
ttcaggtgggctagctacaacgatccacctc

SEQ ID NO: 8129 - DNA, 31 bp, Artificial Sequence
  Description of Artificial Sequence:  Enzymatic Nucleic Acid
tcttcaggggctagctacaacgagctccacc

SEQ ID NO: 8130 - DNA, 31 bp, Artificial Sequence
  Description of Artificial Sequence:  Enzymatic Nucleic Acid
tgctggcaggctagctacaacgactcttcag

SEQ ID NO: 8131 - DNA, 31 bp, Artificial Sequence
  Description of Artificial Sequence:  Enzymatic Nucleic Acid
gctgctggggctagctacaacgaatctcttc

SEQ ID NO: 8132 - DNA, 31 bp, Artificial Sequence
  Description of Artificial Sequence:  Enzymatic Nucleic Acid
atctgctgggctagctacaacgatggcatct

SEQ ID NO: 8133 - DNA, 31 bp, Artificial Sequence
  Description of Artificial Sequence:  Enzymatic Nucleic Acid
gccatctgggctagctacaacgatgctggca

SEQ ID NO: 8134 - DNA, 31 bp, Artificial Sequence
  Description of Artificial Sequence:  Enzymatic Nucleic Acid
ctcagccaggctagctacaacgactgctgct

SEQ ID NO: 8135 - DNA, 31 bp, Artificial Sequence
  Description of Artificial Sequence:  Enzymatic Nucleic Acid
gtcctcagggctagctacaacgacatctgct

SEQ ID NO: 8136 - DNA, 31 bp, Artificial Sequence
  Description of Artificial Sequence:  Enzymatic Nucleic Acid
aggccttgggctagctacaacgacctcagcc

SEQ ID NO: 8137 - DNA, 31 bp, Artificial Sequence
  Description of Artificial Sequence:  Enzymatic Nucleic Acid
cacagaggggctagctacaacgacttgtcct

SEQ ID NO: 8138 - DNA, 31 bp, Artificial Sequence
  Description of Artificial Sequence:  Enzymatic Nucleic Acid
ggctttcaggctagctacaacgaagaggcct

SEQ ID NO: 8139 - DNA, 31 bp, Artificial Sequence
  Description of Artificial Sequence:  Enzymatic Nucleic Acid
cacctgggggctagctacaacgatttcacag

SEQ ID NO: 8140 - DNA, 31 bp, Artificial Sequence
  Description of Artificial Sequence:  Enzymatic Nucleic Acid
ggacgtcaggctagctacaacgactgggctt

SEQ ID NO: 8141 - DNA, 31 bp, Artificial Sequence
  Description of Artificial Sequence:  Enzymatic Nucleic Acid
caaggacgggctagctacaacgacacctggg

SEQ ID NO: 8142 - DNA, 31 bp, Artificial Sequence
  Description of Artificial Sequence:  Enzymatic Nucleic Acid
agcaaggaggctagctacaacgagtcacctg

SEQ ID NO: 8143 - DNA, 31 bp, Artificial Sequence
  Description of Artificial Sequence:  Enzymatic Nucleic Acid
tccccgagggctagctacaacgaaaggacgt

SEQ ID NO: 8144 - DNA, 31 bp, Artificial Sequence
  Description of Artificial Sequence:  Enzymatic Nucleic Acid
tcctgcagggctagctacaacgatccccgag

SEQ ID NO: 8145 - DNA, 31 bp, Artificial Sequence
  Description of Artificial Sequence:  Enzymatic Nucleic Acid
ctctcctgggctagctacaacgaagctcccc

SEQ ID NO: 8146 - DNA, 31 bp, Artificial Sequence
  Description of Artificial Sequence:  Enzymatic Nucleic Acid
gactctggggctagctacaacgatctcctgc

SEQ ID NO: 8147 - DNA, 31 bp, Artificial Sequence
  Description of Artificial Sequence:  Enzymatic Nucleic Acid
ccaagcgaggctagctacaacgatctggctc

SEQ ID NO: 8148 - DNA, 31 bp, Artificial Sequence
  Description of Artificial Sequence:  Enzymatic Nucleic Acid
cctccaagggctagctacaacgagactctgg

SEQ ID NO: 8149 - DNA, 31 bp, Artificial Sequence
  Description of Artificial Sequence:  Enzymatic Nucleic Acid
agtggcagggctagctacaacgactccaagc

SEQ ID NO: 8150 - DNA, 31 bp, Artificial Sequence
  Description of Artificial Sequence:  Enzymatic Nucleic Acid
cttagtggggctagctacaacgaagcctcca

SEQ ID NO: 8151 - DNA, 31 bp, Artificial Sequence
  Description of Artificial Sequence:  Enzymatic Nucleic Acid
ttccttagggctagctacaacgaggcagcct

SEQ ID NO: 8152 - DNA, 31 bp, Artificial Sequence
  Description of Artificial Sequence:  Enzymatic Nucleic Acid
gcctggcaggctagctacaacgatccttagt

SEQ ID NO: 8153 - DNA, 31 bp, Artificial Sequence
  Description of Artificial Sequence:  Enzymatic Nucleic Acid
gagcctggggctagctacaacgaattcctta

SEQ ID NO: 8154 - DNA, 31 bp, Artificial Sequence
  Description of Artificial Sequence:  Enzymatic Nucleic Acid
ctccagagggctagctacaacgactggcatt

SEQ ID NO: 8155 - DNA, 31 bp, Artificial Sequence
  Description of Artificial Sequence:  Enzymatic Nucleic Acid
gggcccgaggctagctacaacgacctccaga

SEQ ID NO: 8156 - DNA, 31 bp, Artificial Sequence
  Description of Artificial Sequence:  Enzymatic Nucleic Acid
cgcccgggggctagctacaacgaccgaccct

SEQ ID NO: 8157 - DNA, 31 bp, Artificial Sequence
  Description of Artificial Sequence:  Enzymatic Nucleic Acid
gctggccgggctagctacaacgaccgggccc

SEQ ID NO: 8158 - DNA, 31 bp, Artificial Sequence
  Description of Artificial Sequence:  Enzymatic Nucleic Acid
ctcgctggggctagctacaacgacgcccggg

SEQ ID NO: 8159 - DNA, 31 bp, Artificial Sequence
  Description of Artificial Sequence:  Enzymatic Nucleic Acid
cctgctcgggctagctacaacgatggccgcc

SEQ ID NO: 8160 - DNA, 31 bp, Artificial Sequence
  Description of Artificial Sequence:  Enzymatic Nucleic Acid
cgcgcctgggctagctacaacgatcgctggc

SEQ ID NO: 8161 - DNA, 31 bp, Artificial Sequence
  Description of Artificial Sequence:  Enzymatic Nucleic Acid
ctgccgcgggctagctacaacgactgctcgc

SEQ ID NO: 8162 - DNA, 31 bp, Artificial Sequence
  Description of Artificial Sequence:  Enzymatic Nucleic Acid
agctgccgggctagctacaacgagcctgctc

SEQ ID NO: 8163 - DNA, 31 bp, Artificial Sequence
  Description of Artificial Sequence:  Enzymatic Nucleic Acid
tccagctgggctagctacaacgacgcgcctg

SEQ ID NO: 8164 - DNA, 31 bp, Artificial Sequence
  Description of Artificial Sequence:  Enzymatic Nucleic Acid
ctctccagggctagctacaacgatgccgcgc

SEQ ID NO: 8165 - DNA, 31 bp, Artificial Sequence
  Description of Artificial Sequence:  Enzymatic Nucleic Acid
cgcgctcaggctagctacaacgatctccagc

SEQ ID NO: 8166 - DNA, 31 bp, Artificial Sequence
  Description of Artificial Sequence:  Enzymatic Nucleic Acid
gcctcgcgggctagctacaacgatcactctc

SEQ ID NO: 8167 - DNA, 31 bp, Artificial Sequence
  Description of Artificial Sequence:  Enzymatic Nucleic Acid
gcgcctcgggctagctacaacgagctcactc

SEQ ID NO: 8168 - DNA, 31 bp, Artificial Sequence
  Description of Artificial Sequence:  Enzymatic Nucleic Acid
ctgcagcgggctagctacaacgactcgcgct

SEQ ID NO: 8169 - DNA, 31 bp, Artificial Sequence
  Description of Artificial Sequence:  Enzymatic Nucleic Acid
tgctgcagggctagctacaacgagcctcgcg

SEQ ID NO: 8170 - DNA, 31 bp, Artificial Sequence
  Description of Artificial Sequence:  Enzymatic Nucleic Acid
tgctgctgggctagctacaacgaagcgcctc

SEQ ID NO: 8171 - DNA, 31 bp, Artificial Sequence
  Description of Artificial Sequence:  Enzymatic Nucleic Acid
tgctgctgggctagctacaacgatgcagcgc

SEQ ID NO: 8172 - DNA, 31 bp, Artificial Sequence
  Description of Artificial Sequence:  Enzymatic Nucleic Acid
ctgtgctgggctagctacaacgatgctgcag

SEQ ID NO: 8173 - DNA, 31 bp, Artificial Sequence
  Description of Artificial Sequence:  Enzymatic Nucleic Acid
acgctgtgggctagctacaacgatgctgctg

SEQ ID NO: 8174 - DNA, 31 bp, Artificial Sequence
  Description of Artificial Sequence:  Enzymatic Nucleic Acid
gcacgctgggctagctacaacgagctgctgc

SEQ ID NO: 8175 - DNA, 31 bp, Artificial Sequence
  Description of Artificial Sequence:  Enzymatic Nucleic Acid
cctgcacgggctagctacaacgatgtgctgc

SEQ ID NO: 8176 - DNA, 31 bp, Artificial Sequence
  Description of Artificial Sequence:  Enzymatic Nucleic Acid
cacctgcaggctagctacaacgagctgtgct

SEQ ID NO: 8177 - DNA, 31 bp, Artificial Sequence
  Description of Artificial Sequence:  Enzymatic Nucleic Acid
tccacctgggctagctacaacgaacgctgtg

SEQ ID NO: 8178 - DNA, 31 bp, Artificial Sequence
  Description of Artificial Sequence:  Enzymatic Nucleic Acid
ctggtccaggctagctacaacgactgcacgc

SEQ ID NO: 8179 - DNA, 31 bp, Artificial Sequence
  Description of Artificial Sequence:  Enzymatic Nucleic Acid
gcagctggggctagctacaacgaccacctgc

SEQ ID NO: 8180 - DNA, 31 bp, Artificial Sequence
  Description of Artificial Sequence:  Enzymatic Nucleic Acid
atgcgcagggctagctacaacgatggtccac

SEQ ID NO: 8181 - DNA, 31 bp, Artificial Sequence
  Description of Artificial Sequence:  Enzymatic Nucleic Acid
tgcatgcgggctagctacaacgaagctggtc

SEQ ID NO: 8182 - DNA, 31 bp, Artificial Sequence
  Description of Artificial Sequence:  Enzymatic Nucleic Acid
cctgcatgggctagctacaacgagcagctgg

SEQ ID NO: 8183 - DNA, 31 bp, Artificial Sequence
  Description of Artificial Sequence:  Enzymatic Nucleic Acid
gccctgcaggctagctacaacgagcgcagct

SEQ ID NO: 8184 - DNA, 31 bp, Artificial Sequence
  Description of Artificial Sequence:  Enzymatic Nucleic Acid
tggccctgggctagctacaacgaatgcgcag

SEQ ID NO: 8185 - DNA, 31 bp, Artificial Sequence
  Description of Artificial Sequence:  Enzymatic Nucleic Acid
cgctctggggctagctacaacgacctgcatg

SEQ ID NO: 8186 - DNA, 31 bp, Artificial Sequence
  Description of Artificial Sequence:  Enzymatic Nucleic Acid
cctccacgggctagctacaacgatctggccc

SEQ ID NO: 8187 - DNA, 31 bp, Artificial Sequence
  Description of Artificial Sequence:  Enzymatic Nucleic Acid
ggcctccaggctagctacaacgagctctggc

SEQ ID NO: 8188 - DNA, 31 bp, Artificial Sequence
  Description of Artificial Sequence:  Enzymatic Nucleic Acid
gagcgcggggctagctacaacgactccacgc

SEQ ID NO: 8189 - DNA, 31 bp, Artificial Sequence
  Description of Artificial Sequence:  Enzymatic Nucleic Acid
gcggagcgggctagctacaacgaggcctcca

SEQ ID NO: 8190 - DNA, 31 bp, Artificial Sequence
  Description of Artificial Sequence:  Enzymatic Nucleic Acid
atgcggagggctagctacaacgagcggcctc

SEQ ID NO: 8191 - DNA, 31 bp, Artificial Sequence
  Description of Artificial Sequence:  Enzymatic Nucleic Acid
gctccatgggctagctacaacgaggagcgcg

SEQ ID NO: 8192 - DNA, 31 bp, Artificial Sequence
  Description of Artificial Sequence:  Enzymatic Nucleic Acid
gcgctccaggctagctacaacgagcggagcg

SEQ ID NO: 8193 - DNA, 31 bp, Artificial Sequence
  Description of Artificial Sequence:  Enzymatic Nucleic Acid
gcctggcgggctagctacaacgatccatgcg

SEQ ID NO: 8194 - DNA, 31 bp, Artificial Sequence
  Description of Artificial Sequence:  Enzymatic Nucleic Acid
cggcctggggctagctacaacgagctccatg

SEQ ID NO: 8195 - DNA, 31 bp, Artificial Sequence
  Description of Artificial Sequence:  Enzymatic Nucleic Acid
cgaggcggggctagctacaacgactggcgct

SEQ ID NO: 8196 - DNA, 31 bp, Artificial Sequence
  Description of Artificial Sequence:  Enzymatic Nucleic Acid
ctccgaggggctagctacaacgaggcctggc

SEQ ID NO: 8197 - DNA, 31 bp, Artificial Sequence
  Description of Artificial Sequence:  Enzymatic Nucleic Acid
tgggccagggctagctacaacgattcctctt

SEQ ID NO: 8198 - DNA, 31 bp, Artificial Sequence
  Description of Artificial Sequence:  Enzymatic Nucleic Acid
caactgggggctagctacaacgacagcttcc

SEQ ID NO: 8199 - DNA, 31 bp, Artificial Sequence
  Description of Artificial Sequence:  Enzymatic Nucleic Acid
acctgcaaggctagctacaacgatgggccag

SEQ ID NO: 8200 - DNA, 31 bp, Artificial Sequence
  Description of Artificial Sequence:  Enzymatic Nucleic Acid
gccacctgggctagctacaacgaaactgggc

SEQ ID NO: 8201 - DNA, 31 bp, Artificial Sequence
  Description of Artificial Sequence:  Enzymatic Nucleic Acid
ataggccaggctagctacaacgactgcaact

SEQ ID NO: 8202 - DNA, 31 bp, Artificial Sequence
  Description of Artificial Sequence:  Enzymatic Nucleic Acid
gtgataggggctagctacaacgacacctgca

SEQ ID NO: 8203 - DNA, 31 bp, Artificial Sequence
  Description of Artificial Sequence:  Enzymatic Nucleic Acid
gctggtgaggctagctacaacgaaggccacc

SEQ ID NO: 8204 - DNA, 31 bp, Artificial Sequence
  Description of Artificial Sequence:  Enzymatic Nucleic Acid
agagctggggctagctacaacgagataggcc

SEQ ID NO: 8205 - DNA, 31 bp, Artificial Sequence
  Description of Artificial Sequence:  Enzymatic Nucleic Acid
tggaagagggctagctacaacgatggtgata

SEQ ID NO: 8206 - DNA, 31 bp, Artificial Sequence
  Description of Artificial Sequence:  Enzymatic Nucleic Acid
ttgtcgtaggctagctacaacgatcttggaa

SEQ ID NO: 8207 - DNA, 31 bp, Artificial Sequence
  Description of Artificial Sequence:  Enzymatic Nucleic Acid
ggttgtcgggctagctacaacgaattcttgg

SEQ ID NO: 8208 - DNA, 31 bp, Artificial Sequence
  Description of Artificial Sequence:  Enzymatic Nucleic Acid
tgtggttgggctagctacaacgacgtattct

SEQ ID NO: 8209 - DNA, 31 bp, Artificial Sequence
  Description of Artificial Sequence:  Enzymatic Nucleic Acid
tgatgtggggctagctacaacgatgtcgtat

SEQ ID NO: 8210 - DNA, 31 bp, Artificial Sequence
  Description of Artificial Sequence:  Enzymatic Nucleic Acid
tcttgatgggctagctacaacgaggttgtcg

SEQ ID NO: 8211 - DNA, 31 bp, Artificial Sequence
  Description of Artificial Sequence:  Enzymatic Nucleic Acid
gctcttgaggctagctacaacgagtggttgt

SEQ ID NO: 8212 - DNA, 31 bp, Artificial Sequence
  Description of Artificial Sequence:  Enzymatic Nucleic Acid
ccacgctgggctagctacaacgatcttgatg

SEQ ID NO: 8213 - DNA, 31 bp, Artificial Sequence
  Description of Artificial Sequence:  Enzymatic Nucleic Acid
ccaccacgggctagctacaacgatgctcttg

SEQ ID NO: 8214 - DNA, 31 bp, Artificial Sequence
  Description of Artificial Sequence:  Enzymatic Nucleic Acid
gcccaccaggctagctacaacgagctgctct

SEQ ID NO: 8215 - DNA, 31 bp, Artificial Sequence
  Description of Artificial Sequence:  Enzymatic Nucleic Acid
actgcccaggctagctacaacgacacgctgc

SEQ ID NO: 8216 - DNA, 31 bp, Artificial Sequence
  Description of Artificial Sequence:  Enzymatic Nucleic Acid
gctcactgggctagctacaacgaccaccacg

SEQ ID NO: 8217 - DNA, 31 bp, Artificial Sequence
  Description of Artificial Sequence:  Enzymatic Nucleic Acid
tccgctcaggctagctacaacgatgcccacc

SEQ ID NO: 8218 - DNA, 31 bp, Artificial Sequence
  Description of Artificial Sequence:  Enzymatic Nucleic Acid
cgcttccgggctagctacaacgatcactgcc

SEQ ID NO: 8219 - DNA, 31 bp, Artificial Sequence
  Description of Artificial Sequence:  Enzymatic Nucleic Acid
attcctcgggctagctacaacgattccgctc

SEQ ID NO: 8220 - DNA, 31 bp, Artificial Sequence
  Description of Artificial Sequence:  Enzymatic Nucleic Acid
cagctgcaggctagctacaacgatcctcgct

SEQ ID NO: 8221 - DNA, 31 bp, Artificial Sequence
  Description of Artificial Sequence:  Enzymatic Nucleic Acid
tccagctgggctagctacaacgaattcctcg

SEQ ID NO: 8222 - DNA, 31 bp, Artificial Sequence
  Description of Artificial Sequence:  Enzymatic Nucleic Acid
tcttccagggctagctacaacgatgcattcc

SEQ ID NO: 8223 - DNA, 31 bp, Artificial Sequence
  Description of Artificial Sequence:  Enzymatic Nucleic Acid
gtttgagaggctagctacaacgacttccagc

SEQ ID NO: 8224 - DNA, 31 bp, Artificial Sequence
  Description of Artificial Sequence:  Enzymatic Nucleic Acid
agctgctgggctagctacaacgattgagatc

SEQ ID NO: 8225 - DNA, 31 bp, Artificial Sequence
  Description of Artificial Sequence:  Enzymatic Nucleic Acid
tggagctgggctagctacaacgatgtttgag

SEQ ID NO: 8226 - DNA, 31 bp, Artificial Sequence
  Description of Artificial Sequence:  Enzymatic Nucleic Acid
tgctggagggctagctacaacgatgctgttt

SEQ ID NO: 8227 - DNA, 31 bp, Artificial Sequence
  Description of Artificial Sequence:  Enzymatic Nucleic Acid
tcggcctgggctagctacaacgatggagctg

SEQ ID NO: 8228 - DNA, 31 bp, Artificial Sequence
  Description of Artificial Sequence:  Enzymatic Nucleic Acid
ctcctcggggctagctacaacgactgctgga

SEQ ID NO: 8229 - DNA, 31 bp, Artificial Sequence
  Description of Artificial Sequence:  Enzymatic Nucleic Acid
caccagggggctagctacaacgactcctcgg

SEQ ID NO: 8230 - DNA, 31 bp, Artificial Sequence
  Description of Artificial Sequence:  Enzymatic Nucleic Acid
tttggccaggctagctacaacgacagggcct

SEQ ID NO: 8231 - DNA, 31 bp, Artificial Sequence
  Description of Artificial Sequence:  Enzymatic Nucleic Acid
ctgtttggggctagctacaacgacaccaggg

SEQ ID NO: 8232 - DNA, 31 bp, Artificial Sequence
  Description of Artificial Sequence:  Enzymatic Nucleic Acid
acctcctgggctagctacaacgattggccac

SEQ ID NO: 8233 - DNA, 31 bp, Artificial Sequence
  Description of Artificial Sequence:  Enzymatic Nucleic Acid
atcgatcaggctagctacaacgactcctgtt

SEQ ID NO: 8234 - DNA, 31 bp, Artificial Sequence
  Description of Artificial Sequence:  Enzymatic Nucleic Acid
cttatcgaggctagctacaacgacacctcct

SEQ ID NO: 8235 - DNA, 31 bp, Artificial Sequence
  Description of Artificial Sequence:  Enzymatic Nucleic Acid
tcagcttaggctagctacaacgacgatcacc

SEQ ID NO: 8236 - DNA, 31 bp, Artificial Sequence
  Description of Artificial Sequence:  Enzymatic Nucleic Acid
tccttcagggctagctacaacgattatcgat

SEQ ID NO: 8237 - DNA, 31 bp, Artificial Sequence
  Description of Artificial Sequence:  Enzymatic Nucleic Acid
ctgctcggggctagctacaacgactcctcct

SEQ ID NO: 8238 - DNA, 31 bp, Artificial Sequence
  Description of Artificial Sequence:  Enzymatic Nucleic Acid
ttgtgctgggctagctacaacgatcggcctc

SEQ ID NO: 8239 - DNA, 31 bp, Artificial Sequence
  Description of Artificial Sequence:  Enzymatic Nucleic Acid
atcttgtgggctagctacaacgatgctcggc

SEQ ID NO: 8240 - DNA, 31 bp, Artificial Sequence
  Description of Artificial Sequence:  Enzymatic Nucleic Acid
caatcttgggctagctacaacgagctgctcg

SEQ ID NO: 8241 - DNA, 31 bp, Artificial Sequence
  Description of Artificial Sequence:  Enzymatic Nucleic Acid
catcacaaggctagctacaacgacttgtgct

SEQ ID NO: 8242 - DNA, 31 bp, Artificial Sequence
  Description of Artificial Sequence:  Enzymatic Nucleic Acid
ctccatcaggctagctacaacgaaatcttgt

SEQ ID NO: 8243 - DNA, 31 bp, Artificial Sequence
  Description of Artificial Sequence:  Enzymatic Nucleic Acid
ggtctccaggctagctacaacgacacaatct

SEQ ID NO: 8244 - DNA, 31 bp, Artificial Sequence
  Description of Artificial Sequence:  Enzymatic Nucleic Acid
cggaacggggctagctacaacgactccatca

SEQ ID NO: 8245 - DNA, 31 bp, Artificial Sequence
  Description of Artificial Sequence:  Enzymatic Nucleic Acid
caccggaaggctagctacaacgaggtctcca

SEQ ID NO: 8246 - DNA, 31 bp, Artificial Sequence
  Description of Artificial Sequence:  Enzymatic Nucleic Acid
cttcagcaggctagctacaacgacggaacgg

SEQ ID NO: 8247 - DNA, 31 bp, Artificial Sequence
  Description of Artificial Sequence:  Enzymatic Nucleic Acid
gccttcagggctagctacaacgaaccggaac

SEQ ID NO: 8248 - DNA, 31 bp, Artificial Sequence
  Description of Artificial Sequence:  Enzymatic Nucleic Acid
cgcctgggggctagctacaacgacttcagca

SEQ ID NO: 8249 - DNA, 31 bp, Artificial Sequence
  Description of Artificial Sequence:  Enzymatic Nucleic Acid
gatatccgggctagctacaacgactgggcct

SEQ ID NO: 8250 - DNA, 31 bp, Artificial Sequence
  Description of Artificial Sequence:  Enzymatic Nucleic Acid
tgtagataggctagctacaacgaccgcctgg

SEQ ID NO: 8251 - DNA, 31 bp, Artificial Sequence
  Description of Artificial Sequence:  Enzymatic Nucleic Acid
cttgtagaggctagctacaacgaatccgcct

SEQ ID NO: 8252 - DNA, 31 bp, Artificial Sequence
  Description of Artificial Sequence:  Enzymatic Nucleic Acid
ccgccttgggctagctacaacgaagatatcc

SEQ ID NO: 8253 - DNA, 31 bp, Artificial Sequence
  Description of Artificial Sequence:  Enzymatic Nucleic Acid
gaagtccgggctagctacaacgacttgtaga

SEQ ID NO: 8254 - DNA, 31 bp, Artificial Sequence
  Description of Artificial Sequence:  Enzymatic Nucleic Acid
cctggaagggctagctacaacgaccgccttg

SEQ ID NO: 8255 - DNA, 31 bp, Artificial Sequence
  Description of Artificial Sequence:  Enzymatic Nucleic Acid
cctctcagggctagctacaacgactggaagt

SEQ ID NO: 8256 - DNA, 31 bp, Artificial Sequence
  Description of Artificial Sequence:  Enzymatic Nucleic Acid
cgggcctgggctagctacaacgactctcagc

SEQ ID NO: 8257 - DNA, 31 bp, Artificial Sequence
  Description of Artificial Sequence:  Enzymatic Nucleic Acid
ctcccgggggctagctacaacgactgcctct

SEQ ID NO: 8258 - DNA, 31 bp, Artificial Sequence
  Description of Artificial Sequence:  Enzymatic Nucleic Acid
tcggccagggctagctacaacgattctcccg

SEQ ID NO: 8259 - DNA, 31 bp, Artificial Sequence
  Description of Artificial Sequence:  Enzymatic Nucleic Acid
cttctcggggctagctacaacgacagcttct

SEQ ID NO: 8260 - DNA, 31 bp, Artificial Sequence
  Description of Artificial Sequence:  Enzymatic Nucleic Acid
tgcaggagggctagctacaacgatccttctt

SEQ ID NO: 8261 - DNA, 31 bp, Artificial Sequence
  Description of Artificial Sequence:  Enzymatic Nucleic Acid
tgctcctgggctagctacaacgaaggagctc

SEQ ID NO: 8262 - DNA, 31 bp, Artificial Sequence
  Description of Artificial Sequence:  Enzymatic Nucleic Acid
tccagctgggctagctacaacgatcctgcag

SEQ ID NO: 8263 - DNA, 31 bp, Artificial Sequence
  Description of Artificial Sequence:  Enzymatic Nucleic Acid
tgctccagggctagctacaacgatgctcctg

SEQ ID NO: 8264 - DNA, 31 bp, Artificial Sequence
  Description of Artificial Sequence:  Enzymatic Nucleic Acid
tgcagctgggctagctacaacgatccagctg

SEQ ID NO: 8265 - DNA, 31 bp, Artificial Sequence
  Description of Artificial Sequence:  Enzymatic Nucleic Acid
ctctgcagggctagctacaacgatgctccag

SEQ ID NO: 8266 - DNA, 31 bp, Artificial Sequence
  Description of Artificial Sequence:  Enzymatic Nucleic Acid
tccctctgggctagctacaacgaagctgctc

SEQ ID NO: 8267 - DNA, 31 bp, Artificial Sequence
  Description of Artificial Sequence:  Enzymatic Nucleic Acid
ttgctgtaggctagctacaacgatccctctg

SEQ ID NO: 8268 - DNA, 31 bp, Artificial Sequence
  Description of Artificial Sequence:  Enzymatic Nucleic Acid
gtttgctgggctagctacaacgaactccctc

SEQ ID NO: 8269 - DNA, 31 bp, Artificial Sequence
  Description of Artificial Sequence:  Enzymatic Nucleic Acid
tcagtttgggctagctacaacgatgtactcc

SEQ ID NO: 8270 - DNA, 31 bp, Artificial Sequence
  Description of Artificial Sequence:  Enzymatic Nucleic Acid
gccttcagggctagctacaacgattgctgta

SEQ ID NO: 8271 - DNA, 31 bp, Artificial Sequence
  Description of Artificial Sequence:  Enzymatic Nucleic Acid
acagctggggctagctacaacgacttcagtt

SEQ ID NO: 8272 - DNA, 31 bp, Artificial Sequence
  Description of Artificial Sequence:  Enzymatic Nucleic Acid
cctgacagggctagctacaacgatggccttc

SEQ ID NO: 8273 - DNA, 31 bp, Artificial Sequence
  Description of Artificial Sequence:  Enzymatic Nucleic Acid
actcctgaggctagctacaacgaagctggcc

SEQ ID NO: 8274 - DNA, 31 bp, Artificial Sequence
  Description of Artificial Sequence:  Enzymatic Nucleic Acid
ctggccgaggctagctacaacgatcctgaca

SEQ ID NO: 8275 - DNA, 31 bp, Artificial Sequence
  Description of Artificial Sequence:  Enzymatic Nucleic Acid
gatcctggggctagctacaacgacgactcct

SEQ ID NO: 8276 - DNA, 31 bp, Artificial Sequence
  Description of Artificial Sequence:  Enzymatic Nucleic Acid
gtcctcgaggctagctacaacgacctggccg

SEQ ID NO: 8277 - DNA, 31 bp, Artificial Sequence
  Description of Artificial Sequence:  Enzymatic Nucleic Acid
tcctcatgggctagctacaacgacctcgatc

SEQ ID NO: 8278 - DNA, 31 bp, Artificial Sequence
  Description of Artificial Sequence:  Enzymatic Nucleic Acid
cttcctcaggctagctacaacgagtcctcga

SEQ ID NO: 8279 - DNA, 31 bp, Artificial Sequence
  Description of Artificial Sequence:  Enzymatic Nucleic Acid
acatgccgggctagctacaacgattcctcat

SEQ ID NO: 8280 - DNA, 31 bp, Artificial Sequence
  Description of Artificial Sequence:  Enzymatic Nucleic Acid
tcgacatgggctagctacaacgacgcttcct

SEQ ID NO: 8281 - DNA, 31 bp, Artificial Sequence
  Description of Artificial Sequence:  Enzymatic Nucleic Acid
cctcgacaggctagctacaacgagccgcttc

SEQ ID NO: 8282 - DNA, 31 bp, Artificial Sequence
  Description of Artificial Sequence:  Enzymatic Nucleic Acid
gacctcgaggctagctacaacgaatgccgct

SEQ ID NO: 8283 - DNA, 31 bp, Artificial Sequence
  Description of Artificial Sequence:  Enzymatic Nucleic Acid
ctgggagaggctagctacaacgactcgacat

SEQ ID NO: 8284 - DNA, 31 bp, Artificial Sequence
  Description of Artificial Sequence:  Enzymatic Nucleic Acid
caagggggggctagctacaacgactgggaga

SEQ ID NO: 8285 - DNA, 31 bp, Artificial Sequence
  Description of Artificial Sequence:  Enzymatic Nucleic Acid
gcggggggggctagctacaacgaaagggggc

SEQ ID NO: 8286 - DNA, 31 bp, Artificial Sequence
  Description of Artificial Sequence:  Enzymatic Nucleic Acid
ggcaggggggctagctacaacgaggggggca

SEQ ID NO: 8287 - DNA, 31 bp, Artificial Sequence
  Description of Artificial Sequence:  Enzymatic Nucleic Acid
gaggtaggggctagctacaacgaaggggcgg

SEQ ID NO: 8288 - DNA, 31 bp, Artificial Sequence
  Description of Artificial Sequence:  Enzymatic Nucleic Acid
aggagaggggctagctacaacgaaggcaggg

SEQ ID NO: 8289 - DNA, 31 bp, Artificial Sequence
  Description of Artificial Sequence:  Enzymatic Nucleic Acid
gggcagggggctagctacaacgacaggggag

SEQ ID NO: 8290 - DNA, 31 bp, Artificial Sequence
  Description of Artificial Sequence:  Enzymatic Nucleic Acid
tggctgggggctagctacaacgaagggccag

SEQ ID NO: 8291 - DNA, 31 bp, Artificial Sequence
  Description of Artificial Sequence:  Enzymatic Nucleic Acid
tcctctggggctagctacaacgatgggcagg

SEQ ID NO: 8292 - DNA, 31 bp, Artificial Sequence
  Description of Artificial Sequence:  Enzymatic Nucleic Acid
cgggggggggctagctacaacgatcctcctc

SEQ ID NO: 8293 - DNA, 31 bp, Artificial Sequence
  Description of Artificial Sequence:  Enzymatic Nucleic Acid
tcaggtggggctagctacaacgatcctcggg

SEQ ID NO: 8294 - DNA, 31 bp, Artificial Sequence
  Description of Artificial Sequence:  Enzymatic Nucleic Acid
aagtcaggggctagctacaacgaggctcctc

SEQ ID NO: 8295 - DNA, 31 bp, Artificial Sequence
  Description of Artificial Sequence:  Enzymatic Nucleic Acid
agcagaagggctagctacaacgacaggtggc

SEQ ID NO: 8296 - DNA, 31 bp, Artificial Sequence
  Description of Artificial Sequence:  Enzymatic Nucleic Acid
tgggacagggctagctacaacgaagaagtca

SEQ ID NO: 8297 - DNA, 31 bp, Artificial Sequence
  Description of Artificial Sequence:  Enzymatic Nucleic Acid
acttgggaggctagctacaacgaagcagaag

SEQ ID NO: 8298 - DNA, 31 bp, Artificial Sequence
  Description of Artificial Sequence:  Enzymatic Nucleic Acid
tactggcaggctagctacaacgattgggaca

SEQ ID NO: 8299 - DNA, 31 bp, Artificial Sequence
  Description of Artificial Sequence:  Enzymatic Nucleic Acid
gatactggggctagctacaacgaacttggga

SEQ ID NO: 8300 - DNA, 31 bp, Artificial Sequence
  Description of Artificial Sequence:  Enzymatic Nucleic Acid
gcctgataggctagctacaacgatggcactt

SEQ ID NO: 8301 - DNA, 31 bp, Artificial Sequence
  Description of Artificial Sequence:  Enzymatic Nucleic Acid
gggcctgaggctagctacaacgaactggcac

SEQ ID NO: 8302 - DNA, 31 bp, Artificial Sequence
  Description of Artificial Sequence:  Enzymatic Nucleic Acid
atcaggggggctagctacaacgactgatact

SEQ ID NO: 8303 - DNA, 31 bp, Artificial Sequence
  Description of Artificial Sequence:  Enzymatic Nucleic Acid
tgtccataggctagctacaacgacaggggcc

SEQ ID NO: 8304 - DNA, 31 bp, Artificial Sequence
  Description of Artificial Sequence:  Enzymatic Nucleic Acid
ggtgtccaggctagctacaacgaatcagggg

SEQ ID NO: 8305 - DNA, 31 bp, Artificial Sequence
  Description of Artificial Sequence:  Enzymatic Nucleic Acid
gcagggtgggctagctacaacgaccatatca

SEQ ID NO: 8306 - DNA, 31 bp, Artificial Sequence
  Description of Artificial Sequence:  Enzymatic Nucleic Acid
ctgcagggggctagctacaacgagtccatat

SEQ ID NO: 8307 - DNA, 31 bp, Artificial Sequence
  Description of Artificial Sequence:  Enzymatic Nucleic Acid
tgtatctgggctagctacaacgaagggtgtc

SEQ ID NO: 8308 - DNA, 31 bp, Artificial Sequence
  Description of Artificial Sequence:  Enzymatic Nucleic Acid
gacatgtaggctagctacaacgactgcaggg

SEQ ID NO: 8309 - DNA, 31 bp, Artificial Sequence
  Description of Artificial Sequence:  Enzymatic Nucleic Acid
atgacatgggctagctacaacgaatctgcag

SEQ ID NO: 8310 - DNA, 31 bp, Artificial Sequence
  Description of Artificial Sequence:  Enzymatic Nucleic Acid
ccatgacaggctagctacaacgagtatctgc

SEQ ID NO: 8311 - DNA, 31 bp, Artificial Sequence
  Description of Artificial Sequence:  Enzymatic Nucleic Acid
ctccatgaggctagctacaacgaatgtatct

SEQ ID NO: 8312 - DNA, 31 bp, Artificial Sequence
  Description of Artificial Sequence:  Enzymatic Nucleic Acid
gcactccaggctagctacaacgagacatgta

SEQ ID NO: 8313 - DNA, 31 bp, Artificial Sequence
  Description of Artificial Sequence:  Enzymatic Nucleic Acid
tcaatgcaggctagctacaacgatccatgac

SEQ ID NO: 8314 - DNA, 31 bp, Artificial Sequence
  Description of Artificial Sequence:  Enzymatic Nucleic Acid
actcaatgggctagctacaacgaactccatg

SEQ ID NO: 8315 - DNA, 31 bp, Artificial Sequence
  Description of Artificial Sequence:  Enzymatic Nucleic Acid
ctactcaaggctagctacaacgagcactcca

SEQ ID NO: 8316 - DNA, 31 bp, Artificial Sequence
  Description of Artificial Sequence:  Enzymatic Nucleic Acid
cggccctaggctagctacaacgatcaatgca

SEQ ID NO: 8317 - DNA, 31 bp, Artificial Sequence
  Description of Artificial Sequence:  Enzymatic Nucleic Acid
ctggccggggctagctacaacgacctactca

SEQ ID NO: 8318 - DNA, 31 bp, Artificial Sequence
  Description of Artificial Sequence:  Enzymatic Nucleic Acid
tgcactggggctagctacaacgacggcccta

SEQ ID NO: 8319 - DNA, 31 bp, Artificial Sequence
  Description of Artificial Sequence:  Enzymatic Nucleic Acid
gccttgcaggctagctacaacgatggccggc

SEQ ID NO: 8320 - DNA, 31 bp, Artificial Sequence
  Description of Artificial Sequence:  Enzymatic Nucleic Acid
tggccttgggctagctacaacgaactggccg

SEQ ID NO: 8321 - DNA, 31 bp, Artificial Sequence
  Description of Artificial Sequence:  Enzymatic Nucleic Acid
ggcagtggggctagctacaacgacttgcact

SEQ ID NO: 8322 - DNA, 31 bp, Artificial Sequence
  Description of Artificial Sequence:  Enzymatic Nucleic Acid
gcaggcagggctagctacaacgaggccttgc

SEQ ID NO: 8323 - DNA, 31 bp, Artificial Sequence
  Description of Artificial Sequence:  Enzymatic Nucleic Acid
cgggcaggggctagctacaacgaagtggcct

SEQ ID NO: 8324 - DNA, 31 bp, Artificial Sequence
  Description of Artificial Sequence:  Enzymatic Nucleic Acid
tcctcgggggctagctacaacgaaggcagtg

SEQ ID NO: 8325 - DNA, 31 bp, Artificial Sequence
  Description of Artificial Sequence:  Enzymatic Nucleic Acid
cgggcacgggctagctacaacgacctcgggc

SEQ ID NO: 8326 - DNA, 31 bp, Artificial Sequence
  Description of Artificial Sequence:  Enzymatic Nucleic Acid
cccgggcaggctagctacaacgagtcctcgg

SEQ ID NO: 8327 - DNA, 31 bp, Artificial Sequence
  Description of Artificial Sequence:  Enzymatic Nucleic Acid
gtcccgggggctagctacaacgaacgtcctc

SEQ ID NO: 8328 - DNA, 31 bp, Artificial Sequence
  Description of Artificial Sequence:  Enzymatic Nucleic Acid
ctgcacggggctagctacaacgacccgggca

SEQ ID NO: 8329 - DNA, 31 bp, Artificial Sequence
  Description of Artificial Sequence:  Enzymatic Nucleic Acid
agactgcaggctagctacaacgaggtcccgg

SEQ ID NO: 8330 - DNA, 31 bp, Artificial Sequence
  Description of Artificial Sequence:  Enzymatic Nucleic Acid
gcagactgggctagctacaacgaacggtccc

SEQ ID NO: 8331 - DNA, 31 bp, Artificial Sequence
  Description of Artificial Sequence:  Enzymatic Nucleic Acid
agcgcagaggctagctacaacgatgcacggt

SEQ ID NO: 8332 - DNA, 31 bp, Artificial Sequence
  Description of Artificial Sequence:  Enzymatic Nucleic Acid
ggaaagcgggctagctacaacgaagactgca

SEQ ID NO: 8333 - DNA, 31 bp, Artificial Sequence
  Description of Artificial Sequence:  Enzymatic Nucleic Acid
gaggaaagggctagctacaacgagcagactg

SEQ ID NO: 8334 - DNA, 31 bp, Artificial Sequence
  Description of Artificial Sequence:  Enzymatic Nucleic Acid
taggcaggggctagctacaacgagggagagg

SEQ ID NO: 8335 - DNA, 31 bp, Artificial Sequence
  Description of Artificial Sequence:  Enzymatic Nucleic Acid
gggctaggggctagctacaacgaaggcggga

SEQ ID NO: 8336 - DNA, 31 bp, Artificial Sequence
  Description of Artificial Sequence:  Enzymatic Nucleic Acid
atcctgggggctagctacaacgataggcagg

SEQ ID NO: 8337 - DNA, 31 bp, Artificial Sequence
  Description of Artificial Sequence:  Enzymatic Nucleic Acid
gcccttcaggctagctacaacgacctgggct

SEQ ID NO: 8338 - DNA, 31 bp, Artificial Sequence
  Description of Artificial Sequence:  Enzymatic Nucleic Acid
ccacccagggctagctacaacgaccttcatc

SEQ ID NO: 8339 - DNA, 31 bp, Artificial Sequence
  Description of Artificial Sequence:  Enzymatic Nucleic Acid
tgtggccaggctagctacaacgaccagccct

SEQ ID NO: 8340 - DNA, 31 bp, Artificial Sequence
  Description of Artificial Sequence:  Enzymatic Nucleic Acid
agttgtggggctagctacaacgacacccagc

SEQ ID NO: 8341 - DNA, 31 bp, Artificial Sequence
  Description of Artificial Sequence:  Enzymatic Nucleic Acid
cccagttgggctagctacaacgaggccaccc

SEQ ID NO: 8342 - DNA, 31 bp, Artificial Sequence
  Description of Artificial Sequence:  Enzymatic Nucleic Acid
catcccagggctagctacaacgatgtggcca

SEQ ID NO: 8343 - DNA, 31 bp, Artificial Sequence
  Description of Artificial Sequence:  Enzymatic Nucleic Acid
aggtggcaggctagctacaacgacccagttg

SEQ ID NO: 8344 - DNA, 31 bp, Artificial Sequence
  Description of Artificial Sequence:  Enzymatic Nucleic Acid
ccaggtggggctagctacaacgaatcccagt

SEQ ID NO: 8345 - DNA, 31 bp, Artificial Sequence
  Description of Artificial Sequence:  Enzymatic Nucleic Acid
gctccaggggctagctacaacgaggcatccc

SEQ ID NO: 8346 - DNA, 31 bp, Artificial Sequence
  Description of Artificial Sequence:  Enzymatic Nucleic Acid
gggtggggggctagctacaacgatccaggtg

SEQ ID NO: 8347 - DNA, 31 bp, Artificial Sequence
  Description of Artificial Sequence:  Enzymatic Nucleic Acid
ctcctgggggctagctacaacgaggggctcc

SEQ ID NO: 8348 - DNA, 31 bp, Artificial Sequence
  Description of Artificial Sequence:  Enzymatic Nucleic Acid
gcggccagggctagctacaacgatcctgggt

SEQ ID NO: 8349 - DNA, 31 bp, Artificial Sequence
  Description of Artificial Sequence:  Enzymatic Nucleic Acid
tgccgcggggctagctacaacgacagctcct

SEQ ID NO: 8350 - DNA, 31 bp, Artificial Sequence
  Description of Artificial Sequence:  Enzymatic Nucleic Acid
aggtgccgggctagctacaacgaggccagct

SEQ ID NO: 8351 - DNA, 31 bp, Artificial Sequence
  Description of Artificial Sequence:  Enzymatic Nucleic Acid
gtaaggtgggctagctacaacgacgcggcca

SEQ ID NO: 8352 - DNA, 31 bp, Artificial Sequence
  Description of Artificial Sequence:  Enzymatic Nucleic Acid
gcgtaaggggctagctacaacgagccgcggc

SEQ ID NO: 8353 - DNA, 31 bp, Artificial Sequence
  Description of Artificial Sequence:  Enzymatic Nucleic Acid
ctgaagcgggctagctacaacgaaaggtgcc

SEQ ID NO: 8354 - DNA, 31 bp, Artificial Sequence
  Description of Artificial Sequence:  Enzymatic Nucleic Acid
agctgaagggctagctacaacgagtaaggtg

SEQ ID NO: 8355 - DNA, 31 bp, Artificial Sequence
  Description of Artificial Sequence:  Enzymatic Nucleic Acid
atcaacagggctagctacaacgatgaagcgt

SEQ ID NO: 8356 - DNA, 31 bp, Artificial Sequence
  Description of Artificial Sequence:  Enzymatic Nucleic Acid
cggatcaaggctagctacaacgaagctgaag

SEQ ID NO: 8357 - DNA, 31 bp, Artificial Sequence
  Description of Artificial Sequence:  Enzymatic Nucleic Acid
ccagcggaggctagctacaacgacaacagct

SEQ ID NO: 8358 - DNA, 31 bp, Artificial Sequence
  Description of Artificial Sequence:  Enzymatic Nucleic Acid
gggaccagggctagctacaacgaggatcaac

SEQ ID NO: 8359 - DNA, 31 bp, Artificial Sequence
  Description of Artificial Sequence:  Enzymatic Nucleic Acid
agaggggaggctagctacaacgacagcggat

SEQ ID NO: 8360 - DNA, 31 bp, Artificial Sequence
  Description of Artificial Sequence:  Enzymatic Nucleic Acid
cgcatctaggctagctacaacgacccaaaag

SEQ ID NO: 8361 - DNA, 31 bp, Artificial Sequence
  Description of Artificial Sequence:  Enzymatic Nucleic Acid
gggccgcaggctagctacaacgactacccca

SEQ ID NO: 8362 - DNA, 31 bp, Artificial Sequence
  Description of Artificial Sequence:  Enzymatic Nucleic Acid
cggggccgggctagctacaacgaatctaccc

SEQ ID NO: 8363 - DNA, 31 bp, Artificial Sequence
  Description of Artificial Sequence:  Enzymatic Nucleic Acid
gatcggggggctagctacaacgacgcatcta

SEQ ID NO: 8364 - DNA, 31 bp, Artificial Sequence
  Description of Artificial Sequence:  Enzymatic Nucleic Acid
aggcctgaggctagctacaacgacggggccg

SEQ ID NO: 8365 - DNA, 31 bp, Artificial Sequence
  Description of Artificial Sequence:  Enzymatic Nucleic Acid
gagtcaggggctagctacaacgactgatcgg

SEQ ID NO: 8366 - DNA, 31 bp, Artificial Sequence
  Description of Artificial Sequence:  Enzymatic Nucleic Acid
gcagcgagggctagctacaacgacaggcctg

SEQ ID NO: 8367 - DNA, 31 bp, Artificial Sequence
  Description of Artificial Sequence:  Enzymatic Nucleic Acid
aagagcagggctagctacaacgagagtcagg

SEQ ID NO: 8368 - DNA, 31 bp, Artificial Sequence
  Description of Artificial Sequence:  Enzymatic Nucleic Acid
aaaaagagggctagctacaacgaagcgagtc

SEQ ID NO: 8369 - DNA, 31 bp, Artificial Sequence
  Description of Artificial Sequence:  Enzymatic Nucleic Acid
gaagggaaggctagctacaacgaaaaaagag

SEQ ID NO: 8370 - DNA, 31 bp, Artificial Sequence
  Description of Artificial Sequence:  Enzymatic Nucleic Acid
cgagcagaggctagctacaacgaagaaggga

SEQ ID NO: 8371 - DNA, 31 bp, Artificial Sequence
  Description of Artificial Sequence:  Enzymatic Nucleic Acid
ggttcgagggctagctacaacgaagacagaa

SEQ ID NO: 8372 - DNA, 31 bp, Artificial Sequence
  Description of Artificial Sequence:  Enzymatic Nucleic Acid
gcaagtggggctagctacaacgatcgagcag

SEQ ID NO: 8373 - DNA, 31 bp, Artificial Sequence
  Description of Artificial Sequence:  Enzymatic Nucleic Acid
gaggcaagggctagctacaacgaggttcgag

SEQ ID NO: 8374 - DNA, 31 bp, Artificial Sequence
  Description of Artificial Sequence:  Enzymatic Nucleic Acid
gcccgaggggctagctacaacgaaagtggtt

SEQ ID NO: 8375 - DNA, 31 bp, Artificial Sequence
  Description of Artificial Sequence:  Enzymatic Nucleic Acid
gggattagggctagctacaacgaccgaggca

SEQ ID NO: 8376 - DNA, 31 bp, Artificial Sequence
  Description of Artificial Sequence:  Enzymatic Nucleic Acid
gggagggaggctagctacaacgatagcccga

SEQ ID NO: 8377 - DNA, 31 bp, Artificial Sequence
  Description of Artificial Sequence:  Enzymatic Nucleic Acid
gtgccgggggctagctacaacgaggaggaag

SEQ ID NO: 8378 - DNA, 31 bp, Artificial Sequence
  Description of Artificial Sequence:  Enzymatic Nucleic Acid
ccccagtgggctagctacaacgacgggtgga

SEQ ID NO: 8379 - DNA, 31 bp, Artificial Sequence
  Description of Artificial Sequence:  Enzymatic Nucleic Acid
ttccccagggctagctacaacgagccgggtg

SEQ ID NO: 8380 - DNA, 31 bp, Artificial Sequence
  Description of Artificial Sequence:  Enzymatic Nucleic Acid
attcttgaggctagctacaacgattccccag

SEQ ID NO: 8381 - DNA, 31 bp, Artificial Sequence
  Description of Artificial Sequence:  Enzymatic Nucleic Acid
aggccccaggctagctacaacgatcttgact

SEQ ID NO: 8382 - DNA, 31 bp, Artificial Sequence
  Description of Artificial Sequence:  Enzymatic Nucleic Acid
gccccaggggctagctacaacgacccattct

SEQ ID NO: 8383 - DNA, 31 bp, Artificial Sequence
  Description of Artificial Sequence:  Enzymatic Nucleic Acid
cctgagagggctagctacaacgacccaggcc

SEQ ID NO: 8384 - DNA, 31 bp, Artificial Sequence
  Description of Artificial Sequence:  Enzymatic Nucleic Acid
ggaagcagggctagctacaacgatctccctg

SEQ ID NO: 8385 - DNA, 31 bp, Artificial Sequence
  Description of Artificial Sequence:  Enzymatic Nucleic Acid
aggggaagggctagctacaacgaagttctcc

SEQ ID NO: 8386 - DNA, 31 bp, Artificial Sequence
  Description of Artificial Sequence:  Enzymatic Nucleic Acid
cagctctgggctagctacaacgacaggggaa

SEQ ID NO: 8387 - DNA, 31 bp, Artificial Sequence
  Description of Artificial Sequence:  Enzymatic Nucleic Acid
ccacccagggctagctacaacgatctgccag

SEQ ID NO: 8388 - DNA, 31 bp, Artificial Sequence
  Description of Artificial Sequence:  Enzymatic Nucleic Acid
agctgccaggctagctacaacgaccagctct

SEQ ID NO: 8389 - DNA, 31 bp, Artificial Sequence
  Description of Artificial Sequence:  Enzymatic Nucleic Acid
aagagctgggctagctacaacgacacccagc

SEQ ID NO: 8390 - DNA, 31 bp, Artificial Sequence
  Description of Artificial Sequence:  Enzymatic Nucleic Acid
aggaagagggctagctacaacgatgccaccc

SEQ ID NO: 8391 - DNA, 31 bp, Artificial Sequence
  Description of Artificial Sequence:  Enzymatic Nucleic Acid
gtgtccggggctagctacaacgagggaggaa

SEQ ID NO: 8392 - DNA, 31 bp, Artificial Sequence
  Description of Artificial Sequence:  Enzymatic Nucleic Acid
ggtcggtgggctagctacaacgaccggtggg

SEQ ID NO: 8393 - DNA, 31 bp, Artificial Sequence
  Description of Artificial Sequence:  Enzymatic Nucleic Acid
cgggtcggggctagctacaacgagtccggtg

SEQ ID NO: 8394 - DNA, 31 bp, Artificial Sequence
  Description of Artificial Sequence:  Enzymatic Nucleic Acid
cgggcgggggctagctacaacgacggtgtcc

SEQ ID NO: 8395 - DNA, 31 bp, Artificial Sequence
  Description of Artificial Sequence:  Enzymatic Nucleic Acid
gcggcgggggctagctacaacgagggtcggt

SEQ ID NO: 8396 - DNA, 31 bp, Artificial Sequence
  Description of Artificial Sequence:  Enzymatic Nucleic Acid
cacagcggggctagctacaacgagggcgggt

SEQ ID NO: 8397 - DNA, 31 bp, Artificial Sequence
  Description of Artificial Sequence:  Enzymatic Nucleic Acid
gggcacagggctagctacaacgaggcgggcg

SEQ ID NO: 8398 - DNA, 31 bp, Artificial Sequence
  Description of Artificial Sequence:  Enzymatic Nucleic Acid
ccagggcaggctagctacaacgaagcggcgg

SEQ ID NO: 8399 - DNA, 31 bp, Artificial Sequence
  Description of Artificial Sequence:  Enzymatic Nucleic Acid
tcccagggggctagctacaacgaacagcggc

SEQ ID NO: 8400 - DNA, 31 bp, Artificial Sequence
  Description of Artificial Sequence:  Enzymatic Nucleic Acid
gggcagcaggctagctacaacgatcccaggg

SEQ ID NO: 8401 - DNA, 31 bp, Artificial Sequence
  Description of Artificial Sequence:  Enzymatic Nucleic Acid
gagggcagggctagctacaacgaactcccag

SEQ ID NO: 8402 - DNA, 31 bp, Artificial Sequence
  Description of Artificial Sequence:  Enzymatic Nucleic Acid
taagagggggctagctacaacgaagcactcc

SEQ ID NO: 8403 - DNA, 31 bp, Artificial Sequence
  Description of Artificial Sequence:  Enzymatic Nucleic Acid
gtgcatggggctagctacaacgaaagagggc

SEQ ID NO: 8404 - DNA, 31 bp, Artificial Sequence
  Description of Artificial Sequence:  Enzymatic Nucleic Acid
cgtgtgcaggctagctacaacgaggtaagag

SEQ ID NO: 8405 - DNA, 31 bp, Artificial Sequence
  Description of Artificial Sequence:  Enzymatic Nucleic Acid
cccgtgtgggctagctacaacgaatggtaag

SEQ ID NO: 8406 - DNA, 31 bp, Artificial Sequence
  Description of Artificial Sequence:  Enzymatic Nucleic Acid
cacccgtgggctagctacaacgagcatggta

SEQ ID NO: 8407 - DNA, 31 bp, Artificial Sequence
  Description of Artificial Sequence:  Enzymatic Nucleic Acid
agcacccgggctagctacaacgagtgcatgg

SEQ ID NO: 8408 - DNA, 31 bp, Artificial Sequence
  Description of Artificial Sequence:  Enzymatic Nucleic Acid
ggagagcaggctagctacaacgaccgtgtgc

SEQ ID NO: 8409 - DNA, 31 bp, Artificial Sequence
  Description of Artificial Sequence:  Enzymatic Nucleic Acid
aaggagagggctagctacaacgaacccgtgt

SEQ ID NO: 8410 - DNA, 31 bp, Artificial Sequence
  Description of Artificial Sequence:  Enzymatic Nucleic Acid
gcatgcagggctagctacaacgaccaaaagg

SEQ ID NO: 8411 - DNA, 31 bp, Artificial Sequence
  Description of Artificial Sequence:  Enzymatic Nucleic Acid
atagcatgggctagctacaacgaagcccaaa

SEQ ID NO: 8412 - DNA, 31 bp, Artificial Sequence
  Description of Artificial Sequence:  Enzymatic Nucleic Acid
gaatagcaggctagctacaacgagcagccca

SEQ ID NO: 8413 - DNA, 31 bp, Artificial Sequence
  Description of Artificial Sequence:  Enzymatic Nucleic Acid
tggaatagggctagctacaacgaatgcagcc

SEQ ID NO: 8414 - DNA, 31 bp, Artificial Sequence
  Description of Artificial Sequence:  Enzymatic Nucleic Acid
aaatggaaggctagctacaacgaagcatgca

SEQ ID NO: 8415 - DNA, 31 bp, Artificial Sequence
  Description of Artificial Sequence:  Enzymatic Nucleic Acid
ctgcaaaaggctagctacaacgaggaatagc

SEQ ID NO: 8416 - DNA, 31 bp, Artificial Sequence
  Description of Artificial Sequence:  Enzymatic Nucleic Acid
tctggctgggctagctacaacgaaaaatgga

SEQ ID NO: 8417 - DNA, 31 bp, Artificial Sequence
  Description of Artificial Sequence:  Enzymatic Nucleic Acid
cggtctggggctagctacaacgatgcaaaat

SEQ ID NO: 8418 - DNA, 31 bp, Artificial Sequence
  Description of Artificial Sequence:  Enzymatic Nucleic Acid
cacatcggggctagctacaacgactggctgc

SEQ ID NO: 8419 - DNA, 31 bp, Artificial Sequence
  Description of Artificial Sequence:  Enzymatic Nucleic Acid
aatacacaggctagctacaacgacggtctgg

SEQ ID NO: 8420 - DNA, 31 bp, Artificial Sequence
  Description of Artificial Sequence:  Enzymatic Nucleic Acid
taaatacaggctagctacaacgaatcggtct

SEQ ID NO: 8421 - DNA, 31 bp, Artificial Sequence
  Description of Artificial Sequence:  Enzymatic Nucleic Acid
gttaaataggctagctacaacgaacatcggt

SEQ ID NO: 8422 - DNA, 31 bp, Artificial Sequence
  Description of Artificial Sequence:  Enzymatic Nucleic Acid
tggttaaaggctagctacaacgaacacatcg

SEQ ID NO: 8423 - DNA, 31 bp, Artificial Sequence
  Description of Artificial Sequence:  Enzymatic Nucleic Acid
gtgactggggctagctacaacgataaataca

SEQ ID NO: 8424 - DNA, 31 bp, Artificial Sequence
  Description of Artificial Sequence:  Enzymatic Nucleic Acid
aatagtgaggctagctacaacgatggttaaa

SEQ ID NO: 8425 - DNA, 31 bp, Artificial Sequence
  Description of Artificial Sequence:  Enzymatic Nucleic Acid
atcaatagggctagctacaacgagactggtt

SEQ ID NO: 8426 - DNA, 31 bp, Artificial Sequence
  Description of Artificial Sequence:  Enzymatic Nucleic Acid
tccatcaaggctagctacaacgaagtgactg

SEQ ID NO: 8427 - DNA, 31 bp, Artificial Sequence
  Description of Artificial Sequence:  Enzymatic Nucleic Acid
aatgtccaggctagctacaacgacaatagtg

SEQ ID NO: 8428 - DNA, 31 bp, Artificial Sequence
  Description of Artificial Sequence:  Enzymatic Nucleic Acid
cccaaatgggctagctacaacgaccatcaat

SEQ ID NO: 8429 - DNA, 31 bp, Artificial Sequence
  Description of Artificial Sequence:  Enzymatic Nucleic Acid
aacccaaaggctagctacaacgagtccatca

SEQ ID NO: 8430 - DNA, 31 bp, Artificial Sequence
  Description of Artificial Sequence:  Enzymatic Nucleic Acid
ggaaacaaggctagctacaacgaccaaatgt

SEQ ID NO: 8431 - DNA, 31 bp, Artificial Sequence
  Description of Artificial Sequence:  Enzymatic Nucleic Acid
atgggaaaggctagctacaacgaaacccaaa

SEQ ID NO: 8432 - DNA, 31 bp, Artificial Sequence
  Description of Artificial Sequence:  Enzymatic Nucleic Acid
caaaaagaggctagctacaacgagggaaaca

SEQ ID NO: 8433 - DNA, 31 bp, Artificial Sequence
  Description of Artificial Sequence:  Enzymatic Nucleic Acid
tatggtaaggctagctacaacgaaaaaagat

SEQ ID NO: 8434 - DNA, 31 bp, Artificial Sequence
  Description of Artificial Sequence:  Enzymatic Nucleic Acid
atttatggggctagctacaacgaaacaaaaa

SEQ ID NO: 8435 - DNA, 31 bp, Artificial Sequence
  Description of Artificial Sequence:  Enzymatic Nucleic Acid
attatttaggctagctacaacgaggtaacaa

SEQ ID NO: 8436 - DNA, 31 bp, Artificial Sequence
  Description of Artificial Sequence:  Enzymatic Nucleic Acid
tgccattaggctagctacaacgattatggta

SEQ ID NO: 8437 - DNA, 31 bp, Artificial Sequence
  Description of Artificial Sequence:  Enzymatic Nucleic Acid
ctatgccaggctagctacaacgatatttatg

SEQ ID NO: 8438 - DNA, 31 bp, Artificial Sequence
  Description of Artificial Sequence:  Enzymatic Nucleic Acid
ttactatgggctagctacaacgacattattt

SEQ ID NO: 8439 - DNA, 31 bp, Artificial Sequence
  Description of Artificial Sequence:  Enzymatic Nucleic Acid
ttttactaggctagctacaacgagccattat

SEQ ID NO: 8440 - DNA, 31 bp, Artificial Sequence
  Description of Artificial Sequence:  Enzymatic Nucleic Acid
tttttttaggctagctacaacgatatgccat

SEQ ID NO: 8441 - RNA, 48 nt, Artificial Sequence
  Description of Artificial Sequence:  Enzymatic Nucleic Acid
acaagggcggaggaaacucccuucaaggacaucguccgggaugcucgu

SEQ ID NO: 8442 - RNA, 48 nt, Artificial Sequence
  Description of Artificial Sequence:  Enzymatic Nucleic Acid
cacaagggggaggaaacucccuucaaggacaucguccgggcaugcucg

SEQ ID NO: 8443 - RNA, 48 nt, Artificial Sequence
  Description of Artificial Sequence:  Enzymatic Nucleic Acid
cuggaucaggaggaaacucccuucaaggacaucguccgggaagggcca

SEQ ID NO: 8444 - RNA, 48 nt, Artificial Sequence
  Description of Artificial Sequence:  Enzymatic Nucleic Acid
accuggauggaggaaacucccuucaaggacaucguccgggacaagggc

SEQ ID NO: 8445 - RNA, 48 nt, Artificial Sequence
  Description of Artificial Sequence:  Enzymatic Nucleic Acid
uuccccacggaggaaacucccuucaaggacaucguccggguggaucac

SEQ ID NO: 8446 - RNA, 48 nt, Artificial Sequence
  Description of Artificial Sequence:  Enzymatic Nucleic Acid
uuuccccaggaggaaacucccuucaaggacaucguccgggcuggauca

SEQ ID NO: 8447 - RNA, 48 nt, Artificial Sequence
  Description of Artificial Sequence:  Enzymatic Nucleic Acid
aguuucccggaggaaacucccuucaaggacaucguccgggaccuggau

SEQ ID NO: 8448 - RNA, 48 nt, Artificial Sequence
  Description of Artificial Sequence:  Enzymatic Nucleic Acid
uaguuuccggaggaaacucccuucaaggacaucguccgggcaccugga

SEQ ID NO: 8449 - RNA, 48 nt, Artificial Sequence
  Description of Artificial Sequence:  Enzymatic Nucleic Acid
uuaguuucggaggaaacucccuucaaggacaucguccgggccaccugg

SEQ ID NO: 8450 - RNA, 48 nt, Artificial Sequence
  Description of Artificial Sequence:  Enzymatic Nucleic Acid
cuuaguuuggaggaaacucccuucaaggacaucguccgggcccaccug

SEQ ID NO: 8451 - RNA, 48 nt, Artificial Sequence
  Description of Artificial Sequence:  Enzymatic Nucleic Acid
cucugggcggaggaaacucccuucaaggacaucguccggguuaguuuc

SEQ ID NO: 8452 - RNA, 48 nt, Artificial Sequence
  Description of Artificial Sequence:  Enzymatic Nucleic Acid
ucucugggggaggaaacucccuucaaggacaucguccgggcuuaguuu

SEQ ID NO: 8453 - RNA, 48 nt, Artificial Sequence
  Description of Artificial Sequence:  Enzymatic Nucleic Acid
ucacuucuggaggaaacucccuucaaggacaucguccgggugggccuu

SEQ ID NO: 8454 - RNA, 48 nt, Artificial Sequence
  Description of Artificial Sequence:  Enzymatic Nucleic Acid
ccucacuuggaggaaacucccuucaaggacaucguccgggucugggcc

SEQ ID NO: 8455 - RNA, 48 nt, Artificial Sequence
  Description of Artificial Sequence:  Enzymatic Nucleic Acid
gguccucaggaggaaacucccuucaaggacaucguccggguucucugg

SEQ ID NO: 8456 - RNA, 48 nt, Artificial Sequence
  Description of Artificial Sequence:  Enzymatic Nucleic Acid
gggguccuggaggaaacucccuucaaggacaucguccgggacuucucu

SEQ ID NO: 8457 - RNA, 48 nt, Artificial Sequence
  Description of Artificial Sequence:  Enzymatic Nucleic Acid
gcggggucggaggaaacucccuucaaggacaucguccgggucacuucu

SEQ ID NO: 8458 - RNA, 48 nt, Artificial Sequence
  Description of Artificial Sequence:  Enzymatic Nucleic Acid
ugcgggguggaggaaacucccuucaaggacaucguccgggcucacuuc

SEQ ID NO: 8459 - RNA, 48 nt, Artificial Sequence
  Description of Artificial Sequence:  Enzymatic Nucleic Acid
auagucugggaggaaacucccuucaaggacaucguccggggggguccu

SEQ ID NO: 8460 - RNA, 48 nt, Artificial Sequence
  Description of Artificial Sequence:  Enzymatic Nucleic Acid
uugauaguggaggaaacucccuucaaggacaucguccgggugcggggu

SEQ ID NO: 8461 - RNA, 48 nt, Artificial Sequence
  Description of Artificial Sequence:  Enzymatic Nucleic Acid
ggaagagaggaggaaacucccuucaaggacaucguccgggugggauug

SEQ ID NO: 8462 - RNA, 48 nt, Artificial Sequence
  Description of Artificial Sequence:  Enzymatic Nucleic Acid
gagcuucaggaggaaacucccuucaaggacaucguccgggagggagug

SEQ ID NO: 8463 - RNA, 48 nt, Artificial Sequence
  Description of Artificial Sequence:  Enzymatic Nucleic Acid
gagagcuuggaggaaacucccuucaaggacaucguccgggacagggag

SEQ ID NO: 8464 - RNA, 48 nt, Artificial Sequence
  Description of Artificial Sequence:  Enzymatic Nucleic Acid
cuggagagggaggaaacucccuucaaggacaucguccggguucacagg

SEQ ID NO: 8465 - RNA, 48 nt, Artificial Sequence
  Description of Artificial Sequence:  Enzymatic Nucleic Acid
cgaugaugggaggaaacucccuucaaggacaucguccggguggagagc

SEQ ID NO: 8466 - RNA, 48 nt, Artificial Sequence
  Description of Artificial Sequence:  Enzymatic Nucleic Acid
ugggaccuggaggaaacucccuucaaggacaucguccggggaugaugc

SEQ ID NO: 8467 - RNA, 48 nt, Artificial Sequence
  Description of Artificial Sequence:  Enzymatic Nucleic Acid
gaugggacggaggaaacucccuucaaggacaucguccgggucgaugau

SEQ ID NO: 8468 - RNA, 48 nt, Artificial Sequence
  Description of Artificial Sequence:  Enzymatic Nucleic Acid
ugaugggaggaggaaacucccuucaaggacaucguccgggcucgauga

SEQ ID NO: 8469 - RNA, 48 nt, Artificial Sequence
  Description of Artificial Sequence:  Enzymatic Nucleic Acid
ggcaagggggaggaaacucccuucaaggacaucguccgggugauggga

SEQ ID NO: 8470 - RNA, 48 nt, Artificial Sequence
  Description of Artificial Sequence:  Enzymatic Nucleic Acid
caacagggggaggaaacucccuucaaggacaucguccgggaagggcug

SEQ ID NO: 8471 - RNA, 48 nt, Artificial Sequence
  Description of Artificial Sequence:  Enzymatic Nucleic Acid
ucauccaaggaggaaacucccuucaaggacaucguccgggagggcaag

SEQ ID NO: 8472 - RNA, 48 nt, Artificial Sequence
  Description of Artificial Sequence:  Enzymatic Nucleic Acid
uauucaucggaggaaacucccuucaaggacaucguccgggaacagggc

SEQ ID NO: 8473 - RNA, 48 nt, Artificial Sequence
  Description of Artificial Sequence:  Enzymatic Nucleic Acid
cuauucauggaggaaacucccuucaaggacaucguccgggcaacaggg

SEQ ID NO: 8474 - RNA, 48 nt, Artificial Sequence
  Description of Artificial Sequence:  Enzymatic Nucleic Acid
ugccuauuggaggaaacucccuucaaggacaucguccgggauccaaca

SEQ ID NO: 8475 - RNA, 48 nt, Artificial Sequence
  Description of Artificial Sequence:  Enzymatic Nucleic Acid
agaggugcggaggaaacucccuucaaggacaucguccggguauucauc

SEQ ID NO: 8476 - RNA, 48 nt, Artificial Sequence
  Description of Artificial Sequence:  Enzymatic Nucleic Acid
cagaggugggaggaaacucccuucaaggacaucguccgggcuauucau

SEQ ID NO: 8477 - RNA, 48 nt, Artificial Sequence
  Description of Artificial Sequence:  Enzymatic Nucleic Acid
ggcucuucggaggaaacucccuucaaggacaucguccgggagaggugc

SEQ ID NO: 8478 - RNA, 48 nt, Artificial Sequence
  Description of Artificial Sequence:  Enzymatic Nucleic Acid
uggcucuuggaggaaacucccuucaaggacaucguccgggcagaggug

SEQ ID NO: 8479 - RNA, 48 nt, Artificial Sequence
  Description of Artificial Sequence:  Enzymatic Nucleic Acid
aguuggcuggaggaaacucccuucaaggacaucguccggguuccagag

SEQ ID NO: 8480 - RNA, 48 nt, Artificial Sequence
  Description of Artificial Sequence:  Enzymatic Nucleic Acid
acaguuggggaggaaacucccuucaaggacaucguccgggucuuccag

SEQ ID NO: 8481 - RNA, 48 nt, Artificial Sequence
  Description of Artificial Sequence:  Enzymatic Nucleic Acid
aucucacaggaggaaacucccuucaaggacaucguccgggaguuggcu

SEQ ID NO: 8482 - RNA, 48 nt, Artificial Sequence
  Description of Artificial Sequence:  Enzymatic Nucleic Acid
ccaucucaggaggaaacucccuucaaggacaucguccgggacaguugg

SEQ ID NO: 8483 - RNA, 48 nt, Artificial Sequence
  Description of Artificial Sequence:  Enzymatic Nucleic Acid
caccaucuggaggaaacucccuucaaggacaucguccgggacacaguu

SEQ ID NO: 8484 - RNA, 48 nt, Artificial Sequence
  Description of Artificial Sequence:  Enzymatic Nucleic Acid
ugcaccauggaggaaacucccuucaaggacaucguccgggucacacag

SEQ ID NO: 8485 - RNA, 48 nt, Artificial Sequence
  Description of Artificial Sequence:  Enzymatic Nucleic Acid
ggcugcacggaggaaacucccuucaaggacaucguccgggaucucaca

SEQ ID NO: 8486 - RNA, 48 nt, Artificial Sequence
  Description of Artificial Sequence:  Enzymatic Nucleic Acid
gggcugcaggaggaaacucccuucaaggacaucguccgggcaucucac

SEQ ID NO: 8487 - RNA, 48 nt, Artificial Sequence
  Description of Artificial Sequence:  Enzymatic Nucleic Acid
cugggcugggaggaaacucccuucaaggacaucguccgggaccaucuc

SEQ ID NO: 8488 - RNA, 48 nt, Artificial Sequence
  Description of Artificial Sequence:  Enzymatic Nucleic Acid
ccacugggggaggaaacucccuucaaggacaucguccgggugcaccau

SEQ ID NO: 8489 - RNA, 48 nt, Artificial Sequence
  Description of Artificial Sequence:  Enzymatic Nucleic Acid
ggccaccaggaggaaacucccuucaaggacaucguccgggugggcugc

SEQ ID NO: 8490 - RNA, 48 nt, Artificial Sequence
  Description of Artificial Sequence:  Enzymatic Nucleic Acid
cgggccacggaggaaacucccuucaaggacaucguccgggacugggcu

SEQ ID NO: 8491 - RNA, 48 nt, Artificial Sequence
  Description of Artificial Sequence:  Enzymatic Nucleic Acid
ccgggccaggaggaaacucccuucaaggacaucguccgggcacugggc

SEQ ID NO: 8492 - RNA, 48 nt, Artificial Sequence
  Description of Artificial Sequence:  Enzymatic Nucleic Acid
ugccgggcggaggaaacucccuucaaggacaucguccgggaccacugg

SEQ ID NO: 8493 - RNA, 48 nt, Artificial Sequence
  Description of Artificial Sequence:  Enzymatic Nucleic Acid
cugccgggggaggaaacucccuucaaggacaucguccgggcaccacug

SEQ ID NO: 8494 - RNA, 48 nt, Artificial Sequence
  Description of Artificial Sequence:  Enzymatic Nucleic Acid
ucugcugcggaggaaacucccuucaaggacaucguccggggggccacc

SEQ ID NO: 8495 - RNA, 48 nt, Artificial Sequence
  Description of Artificial Sequence:  Enzymatic Nucleic Acid
aucugcugggaggaaacucccuucaaggacaucguccgggcgggccac

SEQ ID NO: 8496 - RNA, 48 nt, Artificial Sequence
  Description of Artificial Sequence:  Enzymatic Nucleic Acid
cugaucugggaggaaacucccuucaaggacaucguccgggugccgggc

SEQ ID NO: 8497 - RNA, 48 nt, Artificial Sequence
  Description of Artificial Sequence:  Enzymatic Nucleic Acid
guccugauggaggaaacucccuucaaggacaucguccgggugcugccg

SEQ ID NO: 8498 - RNA, 48 nt, Artificial Sequence
  Description of Artificial Sequence:  Enzymatic Nucleic Acid
aguacgucggaggaaacucccuucaaggacaucguccgggugaucugc

SEQ ID NO: 8499 - RNA, 48 nt, Artificial Sequence
  Description of Artificial Sequence:  Enzymatic Nucleic Acid
caguacguggaggaaacucccuucaaggacaucguccgggcugaucug

SEQ ID NO: 8500 - RNA, 48 nt, Artificial Sequence
  Description of Artificial Sequence:  Enzymatic Nucleic Acid
gcccaguaggaggaaacucccuucaaggacaucguccgggguccugau

SEQ ID NO: 8501 - RNA, 48 nt, Artificial Sequence
  Description of Artificial Sequence:  Enzymatic Nucleic Acid
ucuucgccggaggaaacucccuucaaggacaucguccgggaguacguc

SEQ ID NO: 8502 - RNA, 48 nt, Artificial Sequence
  Description of Artificial Sequence:  Enzymatic Nucleic Acid
cucuucgcggaggaaacucccuucaaggacaucguccgggcaguacgu

SEQ ID NO: 8503 - RNA, 48 nt, Artificial Sequence
  Description of Artificial Sequence:  Enzymatic Nucleic Acid
acucuucgggaggaaacucccuucaaggacaucguccgggccaguacg

SEQ ID NO: 8504 - RNA, 48 nt, Artificial Sequence
  Description of Artificial Sequence:  Enzymatic Nucleic Acid
agacucuuggaggaaacucccuucaaggacaucguccggggcccagua

SEQ ID NO: 8505 - RNA, 48 nt, Artificial Sequence
  Description of Artificial Sequence:  Enzymatic Nucleic Acid
aggagacuggaggaaacucccuucaaggacaucguccggguucgccca

SEQ ID NO: 8506 - RNA, 48 nt, Artificial Sequence
  Description of Artificial Sequence:  Enzymatic Nucleic Acid
agaggagaggaggaaacucccuucaaggacaucguccgggucuucgcc

SEQ ID NO: 8507 - RNA, 48 nt, Artificial Sequence
  Description of Artificial Sequence:  Enzymatic Nucleic Acid
ggcuucccggaggaaacucccuucaaggacaucguccgggagaggaga

SEQ ID NO: 8508 - RNA, 48 nt, Artificial Sequence
  Description of Artificial Sequence:  Enzymatic Nucleic Acid
uggcuuccggaggaaacucccuucaaggacaucguccgggcagaggag

SEQ ID NO: 8509 - RNA, 48 nt, Artificial Sequence
  Description of Artificial Sequence:  Enzymatic Nucleic Acid
cuggcuucggaggaaacucccuucaaggacaucguccgggccagagga

SEQ ID NO: 8510 - RNA, 48 nt, Artificial Sequence
  Description of Artificial Sequence:  Enzymatic Nucleic Acid
gcuggcuuggaggaaacucccuucaaggacaucguccgggcccagagg

SEQ ID NO: 8511 - RNA, 48 nt, Artificial Sequence
  Description of Artificial Sequence:  Enzymatic Nucleic Acid
auggcuggggaggaaacucccuucaaggacaucguccggguuccccag

SEQ ID NO: 8512 - RNA, 48 nt, Artificial Sequence
  Description of Artificial Sequence:  Enzymatic Nucleic Acid
cagcauggggaggaaacucccuucaaggacaucguccggguggcuucc

SEQ ID NO: 8513 - RNA, 48 nt, Artificial Sequence
  Description of Artificial Sequence:  Enzymatic Nucleic Acid
aggugcagggaggaaacucccuucaaggacaucguccgggauggcugg

SEQ ID NO: 8514 - RNA, 48 nt, Artificial Sequence
  Description of Artificial Sequence:  Enzymatic Nucleic Acid
ggcaggugggaggaaacucccuucaaggacaucguccgggagcauggc

SEQ ID NO: 8515 - RNA, 48 nt, Artificial Sequence
  Description of Artificial Sequence:  Enzymatic Nucleic Acid
ucugaaggggaggaaacucccuucaaggacaucguccgggaggugcag

SEQ ID NO: 8516 - RNA, 48 nt, Artificial Sequence
  Description of Artificial Sequence:  Enzymatic Nucleic Acid
gcccuguuggaggaaacucccuucaaggacaucguccgggugaaggca

SEQ ID NO: 8517 - RNA, 48 nt, Artificial Sequence
  Description of Artificial Sequence:  Enzymatic Nucleic Acid
ggagcgccggaggaaacucccuucaaggacaucguccggguguucuga

SEQ ID NO: 8518 - RNA, 48 nt, Artificial Sequence
  Description of Artificial Sequence:  Enzymatic Nucleic Acid
aggagcgcggaggaaacucccuucaaggacaucguccgggcuguucug

SEQ ID NO: 8519 - RNA, 48 nt, Artificial Sequence
  Description of Artificial Sequence:  Enzymatic Nucleic Acid
caggagcgggaggaaacucccuucaaggacaucguccgggccuguucu

SEQ ID NO: 8520 - RNA, 48 nt, Artificial Sequence
  Description of Artificial Sequence:  Enzymatic Nucleic Acid
cucaggagggaggaaacucccuucaaggacaucguccggggcccuguu

SEQ ID NO: 8521 - RNA, 48 nt, Artificial Sequence
  Description of Artificial Sequence:  Enzymatic Nucleic Acid
gagggucuggaggaaacucccuucaaggacaucguccgggaggagcgc

SEQ ID NO: 8522 - RNA, 48 nt, Artificial Sequence
  Description of Artificial Sequence:  Enzymatic Nucleic Acid
uggaggguggaggaaacucccuucaaggacaucguccgggucaggagc

SEQ ID NO: 8523 - RNA, 48 nt, Artificial Sequence
  Description of Artificial Sequence:  Enzymatic Nucleic Acid
aggcagcgggaggaaacucccuucaaggacaucguccggguggagggu

SEQ ID NO: 8524 - RNA, 48 nt, Artificial Sequence
  Description of Artificial Sequence:  Enzymatic Nucleic Acid
ccaggcagggaggaaacucccuucaaggacaucguccggggcuggagg

SEQ ID NO: 8525 - RNA, 48 nt, Artificial Sequence
  Description of Artificial Sequence:  Enzymatic Nucleic Acid
ccuccaggggaggaaacucccuucaaggacaucguccgggagcgcugg

SEQ ID NO: 8526 - RNA, 48 nt, Artificial Sequence
  Description of Artificial Sequence:  Enzymatic Nucleic Acid
uucuccucggaggaaacucccuucaaggacaucguccgggaggcagcg

SEQ ID NO: 8527 - RNA, 48 nt, Artificial Sequence
  Description of Artificial Sequence:  Enzymatic Nucleic Acid
auucuccuggaggaaacucccuucaaggacaucguccgggcaggcagc

SEQ ID NO: 8528 - RNA, 48 nt, Artificial Sequence
  Description of Artificial Sequence:  Enzymatic Nucleic Acid
ugauucucggaggaaacucccuucaaggacaucguccggguccaggca

SEQ ID NO: 8529 - RNA, 48 nt, Artificial Sequence
  Description of Artificial Sequence:  Enzymatic Nucleic Acid
uugauucuggaggaaacucccuucaaggacaucguccgggcuccaggc

SEQ ID NO: 8530 - RNA, 48 nt, Artificial Sequence
  Description of Artificial Sequence:  Enzymatic Nucleic Acid
ucuugauuggaggaaacucccuucaaggacaucguccggguccuccag

SEQ ID NO: 8531 - RNA, 48 nt, Artificial Sequence
  Description of Artificial Sequence:  Enzymatic Nucleic Acid
ucggagcuggaggaaacucccuucaaggacaucguccggguugauucu

SEQ ID NO: 8532 - RNA, 48 nt, Artificial Sequence
  Description of Artificial Sequence:  Enzymatic Nucleic Acid
ucucggagggaggaaacucccuucaaggacaucguccgggucuugauu

SEQ ID NO: 8533 - RNA, 48 nt, Artificial Sequence
  Description of Artificial Sequence:  Enzymatic Nucleic Acid
uggcaucuggaggaaacucccuucaaggacaucguccgggggagcucu

SEQ ID NO: 8534 - RNA, 48 nt, Artificial Sequence
  Description of Artificial Sequence:  Enzymatic Nucleic Acid
gauggcauggaggaaacucccuucaaggacaucguccgggucggagcu

SEQ ID NO: 8535 - RNA, 48 nt, Artificial Sequence
  Description of Artificial Sequence:  Enzymatic Nucleic Acid
ccggauggggaggaaacucccuucaaggacaucguccgggaucucgga

SEQ ID NO: 8536 - RNA, 48 nt, Artificial Sequence
  Description of Artificial Sequence:  Enzymatic Nucleic Acid
ugcucugcggaggaaacucccuucaaggacaucguccgggggauggca

SEQ ID NO: 8537 - RNA, 48 nt, Artificial Sequence
  Description of Artificial Sequence:  Enzymatic Nucleic Acid
uugcucugggaggaaacucccuucaaggacaucguccgggcggauggc

SEQ ID NO: 8538 - RNA, 48 nt, Artificial Sequence
  Description of Artificial Sequence:  Enzymatic Nucleic Acid
ugguugcuggaggaaacucccuucaaggacaucguccgggugccggau

SEQ ID NO: 8539 - RNA, 48 nt, Artificial Sequence
  Description of Artificial Sequence:  Enzymatic Nucleic Acid
ucugguugggaggaaacucccuucaaggacaucguccgggucugccgg

SEQ ID NO: 8540 - RNA, 48 nt, Artificial Sequence
  Description of Artificial Sequence:  Enzymatic Nucleic Acid
cgcagaauggaggaaacucccuucaaggacaucguccgggugguugcu

SEQ ID NO: 8541 - RNA, 48 nt, Artificial Sequence
  Description of Artificial Sequence:  Enzymatic Nucleic Acid
cgcucccgggaggaaacucccuucaaggacaucguccgggagaaucug

SEQ ID NO: 8542 - RNA, 48 nt, Artificial Sequence
  Description of Artificial Sequence:  Enzymatic Nucleic Acid
agcgcuccggaggaaacucccuucaaggacaucguccggggcagaauc

SEQ ID NO: 8543 - RNA, 48 nt, Artificial Sequence
  Description of Artificial Sequence:  Enzymatic Nucleic Acid
cagcgcucggaggaaacucccuucaaggacaucguccgggcgcagaau

SEQ ID NO: 8544 - RNA, 48 nt, Artificial Sequence
  Description of Artificial Sequence:  Enzymatic Nucleic Acid
gcagcgcuggaggaaacucccuucaaggacaucguccgggccgcagaa

SEQ ID NO: 8545 - RNA, 48 nt, Artificial Sequence
  Description of Artificial Sequence:  Enzymatic Nucleic Acid
ucgcagcgggaggaaacucccuucaaggacaucguccgggucccgcag

SEQ ID NO: 8546 - RNA, 48 nt, Artificial Sequence
  Description of Artificial Sequence:  Enzymatic Nucleic Acid
ccucgcagggaggaaacucccuucaaggacaucguccggggcucccgc

SEQ ID NO: 8547 - RNA, 48 nt, Artificial Sequence
  Description of Artificial Sequence:  Enzymatic Nucleic Acid
gcuccucgggaggaaacucccuucaaggacaucguccgggagcgcucc

SEQ ID NO: 8548 - RNA, 48 nt, Artificial Sequence
  Description of Artificial Sequence:  Enzymatic Nucleic Acid
aagcuccuggaggaaacucccuucaaggacaucguccggggcagcgcu

SEQ ID NO: 8549 - RNA, 48 nt, Artificial Sequence
  Description of Artificial Sequence:  Enzymatic Nucleic Acid
agaagcucggaggaaacucccuucaaggacaucguccgggucgcagcg

SEQ ID NO: 8550 - RNA, 48 nt, Artificial Sequence
  Description of Artificial Sequence:  Enzymatic Nucleic Acid
cagaagcuggaggaaacucccuucaaggacaucguccgggcucgcagc

SEQ ID NO: 8551 - RNA, 48 nt, Artificial Sequence
  Description of Artificial Sequence:  Enzymatic Nucleic Acid
ugcagaagggaggaaacucccuucaaggacaucguccggguccucgca

SEQ ID NO: 8552 - RNA, 48 nt, Artificial Sequence
  Description of Artificial Sequence:  Enzymatic Nucleic Acid
uggaaaugggaggaaacucccuucaaggacaucguccgggagaagcuc

SEQ ID NO: 8553 - RNA, 48 nt, Artificial Sequence
  Description of Artificial Sequence:  Enzymatic Nucleic Acid
cuggcuggggaggaaacucccuucaaggacaucguccggguuggaaau

SEQ ID NO: 8554 - RNA, 48 nt, Artificial Sequence
  Description of Artificial Sequence:  Enzymatic Nucleic Acid
cccucuggggaggaaacucccuucaaggacaucguccggguggcuugg

SEQ ID NO: 8555 - RNA, 48 nt, Artificial Sequence
  Description of Artificial Sequence:  Enzymatic Nucleic Acid
uccucccuggaggaaacucccuucaaggacaucguccggguggcuggc

SEQ ID NO: 8556 - RNA, 48 nt, Artificial Sequence
  Description of Artificial Sequence:  Enzymatic Nucleic Acid
ucuccuccggaggaaacucccuucaaggacaucguccgggucuggcug

SEQ ID NO: 8557 - RNA, 48 nt, Artificial Sequence
  Description of Artificial Sequence:  Enzymatic Nucleic Acid
uucuccucggaggaaacucccuucaaggacaucguccgggcucuggcu

SEQ ID NO: 8558 - RNA, 48 nt, Artificial Sequence
  Description of Artificial Sequence:  Enzymatic Nucleic Acid
cuucuccuggaggaaacucccuucaaggacaucguccgggccucuggc

SEQ ID NO: 8559 - RNA, 48 nt, Artificial Sequence
  Description of Artificial Sequence:  Enzymatic Nucleic Acid
uccuucucggaggaaacucccuucaaggacaucguccgggucccucug

SEQ ID NO: 8560 - RNA, 48 nt, Artificial Sequence
  Description of Artificial Sequence:  Enzymatic Nucleic Acid
cuccuucuggaggaaacucccuucaaggacaucguccgggcucccucu

SEQ ID NO: 8561 - RNA, 48 nt, Artificial Sequence
  Description of Artificial Sequence:  Enzymatic Nucleic Acid
aacuccuuggaggaaacucccuucaaggacaucguccggguccucccu

SEQ ID NO: 8562 - RNA, 48 nt, Artificial Sequence
  Description of Artificial Sequence:  Enzymatic Nucleic Acid
aggaacucggaggaaacucccuucaaggacaucguccggguucuccuc

SEQ ID NO: 8563 - RNA, 48 nt, Artificial Sequence
  Description of Artificial Sequence:  Enzymatic Nucleic Acid
gaggaacuggaggaaacucccuucaaggacaucguccgggcuucuccu

SEQ ID NO: 8564 - RNA, 48 nt, Artificial Sequence
  Description of Artificial Sequence:  Enzymatic Nucleic Acid
augaggaaggaggaaacucccuucaaggacaucguccggguccuucuc

SEQ ID NO: 8565 - RNA, 48 nt, Artificial Sequence
  Description of Artificial Sequence:  Enzymatic Nucleic Acid
aacuugcaggaggaaacucccuucaaggacaucguccgggaugaggaa

SEQ ID NO: 8566 - RNA, 48 nt, Artificial Sequence
  Description of Artificial Sequence:  Enzymatic Nucleic Acid
ggaacuugggaggaaacucccuucaaggacaucguccgggacaugagg

SEQ ID NO: 8567 - RNA, 48 nt, Artificial Sequence
  Description of Artificial Sequence:  Enzymatic Nucleic Acid
uccuggaaggaggaaacucccuucaaggacaucguccggguugcacau

SEQ ID NO: 8568 - RNA, 48 nt, Artificial Sequence
  Description of Artificial Sequence:  Enzymatic Nucleic Acid
cuggccucggaggaaacucccuucaaggacaucguccggguggaacuu

SEQ ID NO: 8569 - RNA, 48 nt, Artificial Sequence
  Description of Artificial Sequence:  Enzymatic Nucleic Acid
ccuggccuggaggaaacucccuucaaggacaucguccgggcuggaacu

SEQ ID NO: 8570 - RNA, 48 nt, Artificial Sequence
  Description of Artificial Sequence:  Enzymatic Nucleic Acid
uuccuggcggaggaaacucccuucaaggacaucguccggguccuggaa

SEQ ID NO: 8571 - RNA, 48 nt, Artificial Sequence
  Description of Artificial Sequence:  Enzymatic Nucleic Acid
uuuccuggggaggaaacucccuucaaggacaucguccgggcuccugga

SEQ ID NO: 8572 - RNA, 48 nt, Artificial Sequence
  Description of Artificial Sequence:  Enzymatic Nucleic Acid
ccaguuucggaggaaacucccuucaaggacaucguccggguggccucc

SEQ ID NO: 8573 - RNA, 48 nt, Artificial Sequence
  Description of Artificial Sequence:  Enzymatic Nucleic Acid
accaguuuggaggaaacucccuucaaggacaucguccgggcuggccuc

SEQ ID NO: 8574 - RNA, 48 nt, Artificial Sequence
  Description of Artificial Sequence:  Enzymatic Nucleic Acid
cucuccacggaggaaacucccuucaaggacaucguccgggaguuuccu

SEQ ID NO: 8575 - RNA, 48 nt, Artificial Sequence
  Description of Artificial Sequence:  Enzymatic Nucleic Acid
ucucuccaggaggaaacucccuucaaggacaucguccgggcaguuucc

SEQ ID NO: 8576 - RNA, 48 nt, Artificial Sequence
  Description of Artificial Sequence:  Enzymatic Nucleic Acid
agucucucggaggaaacucccuucaaggacaucguccgggaccaguuu

SEQ ID NO: 8577 - RNA, 48 nt, Artificial Sequence
  Description of Artificial Sequence:  Enzymatic Nucleic Acid
gagucucuggaggaaacucccuucaaggacaucguccgggcaccaguu

SEQ ID NO: 8578 - RNA, 48 nt, Artificial Sequence
  Description of Artificial Sequence:  Enzymatic Nucleic Acid
ccgagucuggaggaaacucccuucaaggacaucguccggguccaccag

SEQ ID NO: 8579 - RNA, 48 nt, Artificial Sequence
  Description of Artificial Sequence:  Enzymatic Nucleic Acid
ggccgaguggaggaaacucccuucaaggacaucguccgggucuccacc

SEQ ID NO: 8580 - RNA, 48 nt, Artificial Sequence
  Description of Artificial Sequence:  Enzymatic Nucleic Acid
cuccaggcggaggaaacucccuucaaggacaucguccggggagucucu

SEQ ID NO: 8581 - RNA, 48 nt, Artificial Sequence
  Description of Artificial Sequence:  Enzymatic Nucleic Acid
ucuccaggggaggaaacucccuucaaggacaucguccgggcgagucuc

SEQ ID NO: 8582 - RNA, 48 nt, Artificial Sequence
  Description of Artificial Sequence:  Enzymatic Nucleic Acid
agcuucucggaggaaacucccuucaaggacaucguccgggaggccgag

SEQ ID NO: 8583 - RNA, 48 nt, Artificial Sequence
  Description of Artificial Sequence:  Enzymatic Nucleic Acid
gagcuucuggaggaaacucccuucaaggacaucguccgggcaggccga

SEQ ID NO: 8584 - RNA, 48 nt, Artificial Sequence
  Description of Artificial Sequence:  Enzymatic Nucleic Acid
ucgagcuuggaggaaacucccuucaaggacaucguccggguccaggcc

SEQ ID NO: 8585 - RNA, 48 nt, Artificial Sequence
  Description of Artificial Sequence:  Enzymatic Nucleic Acid
agaucgagggaggaaacucccuucaaggacaucguccggguucuccag

SEQ ID NO: 8586 - RNA, 48 nt, Artificial Sequence
  Description of Artificial Sequence:  Enzymatic Nucleic Acid
cuucagauggaggaaacucccuucaaggacaucguccggggagcuucu

SEQ ID NO: 8587 - RNA, 48 nt, Artificial Sequence
  Description of Artificial Sequence:  Enzymatic Nucleic Acid
ugccucuuggaggaaacucccuucaaggacaucguccgggagaucgag

SEQ ID NO: 8588 - RNA, 48 nt, Artificial Sequence
  Description of Artificial Sequence:  Enzymatic Nucleic Acid
uucugccuggaggaaacucccuucaaggacaucguccggguucagauc

SEQ ID NO: 8589 - RNA, 48 nt, Artificial Sequence
  Description of Artificial Sequence:  Enzymatic Nucleic Acid
ccuucugcggaggaaacucccuucaaggacaucguccgggucuucaga

SEQ ID NO: 8590 - RNA, 48 nt, Artificial Sequence
  Description of Artificial Sequence:  Enzymatic Nucleic Acid
uccuucugggaggaaacucccuucaaggacaucguccgggcucuucag

SEQ ID NO: 8591 - RNA, 48 nt, Artificial Sequence
  Description of Artificial Sequence:  Enzymatic Nucleic Acid
ugcuccuuggaggaaacucccuucaaggacaucguccgggugccucuu

SEQ ID NO: 8592 - RNA, 48 nt, Artificial Sequence
  Description of Artificial Sequence:  Enzymatic Nucleic Acid
gccugcucggaggaaacucccuucaaggacaucguccggguucugccu

SEQ ID NO: 8593 - RNA, 48 nt, Artificial Sequence
  Description of Artificial Sequence:  Enzymatic Nucleic Acid
agccugcuggaggaaacucccuucaaggacaucguccgggcuucugcc

SEQ ID NO: 8594 - RNA, 48 nt, Artificial Sequence
  Description of Artificial Sequence:  Enzymatic Nucleic Acid
agagccugggaggaaacucccuucaaggacaucguccggguccuucug

SEQ ID NO: 8595 - RNA, 48 nt, Artificial Sequence
  Description of Artificial Sequence:  Enzymatic Nucleic Acid
cgcagagcggaggaaacucccuucaaggacaucguccgggugcuccuu

SEQ ID NO: 8596 - RNA, 48 nt, Artificial Sequence
  Description of Artificial Sequence:  Enzymatic Nucleic Acid
ccgcagagggaggaaacucccuucaaggacaucguccgggcugcuccu

SEQ ID NO: 8597 - RNA, 48 nt, Artificial Sequence
  Description of Artificial Sequence:  Enzymatic Nucleic Acid
accucccgggaggaaacucccuucaaggacaucguccgggagagccug

SEQ ID NO: 8598 - RNA, 48 nt, Artificial Sequence
  Description of Artificial Sequence:  Enzymatic Nucleic Acid
ccaccuccggaggaaacucccuucaaggacaucguccggggcagagcc

SEQ ID NO: 8599 - RNA, 48 nt, Artificial Sequence
  Description of Artificial Sequence:  Enzymatic Nucleic Acid
uccaccucggaggaaacucccuucaaggacaucguccgggcgcagagc

SEQ ID NO: 8600 - RNA, 48 nt, Artificial Sequence
  Description of Artificial Sequence:  Enzymatic Nucleic Acid
cuccaccuggaggaaacucccuucaaggacaucguccgggccgcagag

SEQ ID NO: 8601 - RNA, 48 nt, Artificial Sequence
  Description of Artificial Sequence:  Enzymatic Nucleic Acid
ugcuccacggaggaaacucccuucaaggacaucguccgggucccgcag

SEQ ID NO: 8602 - RNA, 48 nt, Artificial Sequence
  Description of Artificial Sequence:  Enzymatic Nucleic Acid
gugcuccaggaggaaacucccuucaaggacaucguccgggcucccgca

SEQ ID NO: 8603 - RNA, 48 nt, Artificial Sequence
  Description of Artificial Sequence:  Enzymatic Nucleic Acid
aggugcucggaggaaacucccuucaaggacaucguccgggaccucccg

SEQ ID NO: 8604 - RNA, 48 nt, Artificial Sequence
  Description of Artificial Sequence:  Enzymatic Nucleic Acid
caggugcuggaggaaacucccuucaaggacaucguccgggcaccuccc

SEQ ID NO: 8605 - RNA, 48 nt, Artificial Sequence
  Description of Artificial Sequence:  Enzymatic Nucleic Acid
uucaggugggaggaaacucccuucaaggacaucguccggguccaccuc

SEQ ID NO: 8606 - RNA, 48 nt, Artificial Sequence
  Description of Artificial Sequence:  Enzymatic Nucleic Acid
caucucuuggaggaaacucccuucaaggacaucguccgggaggugcuc

SEQ ID NO: 8607 - RNA, 48 nt, Artificial Sequence
  Description of Artificial Sequence:  Enzymatic Nucleic Acid
uggcaucuggaggaaacucccuucaaggacaucguccggguucaggug

SEQ ID NO: 8608 - RNA, 48 nt, Artificial Sequence
  Description of Artificial Sequence:  Enzymatic Nucleic Acid
gcuggcauggaggaaacucccuucaaggacaucguccgggucuucagg

SEQ ID NO: 8609 - RNA, 48 nt, Artificial Sequence
  Description of Artificial Sequence:  Enzymatic Nucleic Acid
gcugcuggggaggaaacucccuucaaggacaucguccgggaucucuuc

SEQ ID NO: 8610 - RNA, 48 nt, Artificial Sequence
  Description of Artificial Sequence:  Enzymatic Nucleic Acid
aucugcugggaggaaacucccuucaaggacaucguccggguggcaucu

SEQ ID NO: 8611 - RNA, 48 nt, Artificial Sequence
  Description of Artificial Sequence:  Enzymatic Nucleic Acid
gccaucugggaggaaacucccuucaaggacaucguccgggugcuggca

SEQ ID NO: 8612 - RNA, 48 nt, Artificial Sequence
  Description of Artificial Sequence:  Enzymatic Nucleic Acid
ucagccauggaggaaacucccuucaaggacaucguccgggugcugcug

SEQ ID NO: 8613 - RNA, 48 nt, Artificial Sequence
  Description of Artificial Sequence:  Enzymatic Nucleic Acid
uccucagcggaggaaacucccuucaaggacaucguccgggaucugcug

SEQ ID NO: 8614 - RNA, 48 nt, Artificial Sequence
  Description of Artificial Sequence:  Enzymatic Nucleic Acid
guccucagggaggaaacucccuucaaggacaucguccgggcaucugcu

SEQ ID NO: 8615 - RNA, 48 nt, Artificial Sequence
  Description of Artificial Sequence:  Enzymatic Nucleic Acid
cuuguccuggaggaaacucccuucaaggacaucguccgggagccaucu

SEQ ID NO: 8616 - RNA, 48 nt, Artificial Sequence
  Description of Artificial Sequence:  Enzymatic Nucleic Acid
gccuugucggaggaaacucccuucaaggacaucguccgggucagccau

SEQ ID NO: 8617 - RNA, 48 nt, Artificial Sequence
  Description of Artificial Sequence:  Enzymatic Nucleic Acid
ggccuuguggaggaaacucccuucaaggacaucguccgggcucagcca

SEQ ID NO: 8618 - RNA, 48 nt, Artificial Sequence
  Description of Artificial Sequence:  Enzymatic Nucleic Acid
acagaggcggaggaaacucccuucaaggacaucguccggguuguccuc

SEQ ID NO: 8619 - RNA, 48 nt, Artificial Sequence
  Description of Artificial Sequence:  Enzymatic Nucleic Acid
cacagaggggaggaaacucccuucaaggacaucguccgggcuuguccu

SEQ ID NO: 8620 - RNA, 48 nt, Artificial Sequence
  Description of Artificial Sequence:  Enzymatic Nucleic Acid
ggcuuucaggaggaaacucccuucaaggacaucguccgggagaggccu

SEQ ID NO: 8621 - RNA, 48 nt, Artificial Sequence
  Description of Artificial Sequence:  Enzymatic Nucleic Acid
ugggcuuuggaggaaacucccuucaaggacaucguccgggacagaggc

SEQ ID NO: 8622 - RNA, 48 nt, Artificial Sequence
  Description of Artificial Sequence:  Enzymatic Nucleic Acid
caccugggggaggaaacucccuucaaggacaucguccggguuucacag

SEQ ID NO: 8623 - RNA, 48 nt, Artificial Sequence
  Description of Artificial Sequence:  Enzymatic Nucleic Acid
gacgucacggaggaaacucccuucaaggacaucguccgggugggcuuu

SEQ ID NO: 8624 - RNA, 48 nt, Artificial Sequence
  Description of Artificial Sequence:  Enzymatic Nucleic Acid
ggacgucaggaggaaacucccuucaaggacaucguccgggcugggcuu

SEQ ID NO: 8625 - RNA, 48 nt, Artificial Sequence
  Description of Artificial Sequence:  Enzymatic Nucleic Acid
aaggacguggaggaaacucccuucaaggacaucguccgggaccugggc

SEQ ID NO: 8626 - RNA, 48 nt, Artificial Sequence
  Description of Artificial Sequence:  Enzymatic Nucleic Acid
agcaaggaggaggaaacucccuucaaggacaucguccggggucaccug

SEQ ID NO: 8627 - RNA, 48 nt, Artificial Sequence
  Description of Artificial Sequence:  Enzymatic Nucleic Acid
uccccgagggaggaaacucccuucaaggacaucguccgggaaggacgu

SEQ ID NO: 8628 - RNA, 48 nt, Artificial Sequence
  Description of Artificial Sequence:  Enzymatic Nucleic Acid
cagcucccggaggaaacucccuucaaggacaucguccggggagcaagg

SEQ ID NO: 8629 - RNA, 48 nt, Artificial Sequence
  Description of Artificial Sequence:  Enzymatic Nucleic Acid
gcagcuccggaggaaacucccuucaaggacaucguccgggcgagcaag

SEQ ID NO: 8630 - RNA, 48 nt, Artificial Sequence
  Description of Artificial Sequence:  Enzymatic Nucleic Acid
ugcagcucggaggaaacucccuucaaggacaucguccgggccgagcaa

SEQ ID NO: 8631 - RNA, 48 nt, Artificial Sequence
  Description of Artificial Sequence:  Enzymatic Nucleic Acid
cugcagcuggaggaaacucccuucaaggacaucguccgggcccgagca

SEQ ID NO: 8632 - RNA, 48 nt, Artificial Sequence
  Description of Artificial Sequence:  Enzymatic Nucleic Acid
uccugcagggaggaaacucccuucaaggacaucguccggguccccgag

SEQ ID NO: 8633 - RNA, 48 nt, Artificial Sequence
  Description of Artificial Sequence:  Enzymatic Nucleic Acid
cucuccugggaggaaacucccuucaaggacaucguccgggagcucccc

SEQ ID NO: 8634 - RNA, 48 nt, Artificial Sequence
  Description of Artificial Sequence:  Enzymatic Nucleic Acid
uggcucucggaggaaacucccuucaaggacaucguccgggugcagcuc

SEQ ID NO: 8635 - RNA, 48 nt, Artificial Sequence
  Description of Artificial Sequence:  Enzymatic Nucleic Acid
cuggcucuggaggaaacucccuucaaggacaucguccgggcugcagcu

SEQ ID NO: 8636 - RNA, 48 nt, Artificial Sequence
  Description of Artificial Sequence:  Enzymatic Nucleic Acid
cucuggcuggaggaaacucccuucaaggacaucguccggguccugcag

SEQ ID NO: 8637 - RNA, 48 nt, Artificial Sequence
  Description of Artificial Sequence:  Enzymatic Nucleic Acid
gacucuggggaggaaacucccuucaaggacaucguccgggucuccugc

SEQ ID NO: 8638 - RNA, 48 nt, Artificial Sequence
  Description of Artificial Sequence:  Enzymatic Nucleic Acid
aagcgacuggaggaaacucccuucaaggacaucguccggguggcucuc

SEQ ID NO: 8639 - RNA, 48 nt, Artificial Sequence
  Description of Artificial Sequence:  Enzymatic Nucleic Acid
ccaagcgaggaggaaacucccuucaaggacaucguccgggucuggcuc

SEQ ID NO: 8640 - RNA, 48 nt, Artificial Sequence
  Description of Artificial Sequence:  Enzymatic Nucleic Acid
ccuccaagggaggaaacucccuucaaggacaucguccggggacucugg

SEQ ID NO: 8641 - RNA, 48 nt, Artificial Sequence
  Description of Artificial Sequence:  Enzymatic Nucleic Acid
gcagccucggaggaaacucccuucaaggacaucguccgggaagcgacu

SEQ ID NO: 8642 - RNA, 48 nt, Artificial Sequence
  Description of Artificial Sequence:  Enzymatic Nucleic Acid
ggcagccuggaggaaacucccuucaaggacaucguccgggcaagcgac

SEQ ID NO: 8643 - RNA, 48 nt, Artificial Sequence
  Description of Artificial Sequence:  Enzymatic Nucleic Acid
guggcagcggaggaaacucccuucaaggacaucguccggguccaagcg

SEQ ID NO: 8644 - RNA, 48 nt, Artificial Sequence
  Description of Artificial Sequence:  Enzymatic Nucleic Acid
aguggcagggaggaaacucccuucaaggacaucguccgggcuccaagc

SEQ ID NO: 8645 - RNA, 48 nt, Artificial Sequence
  Description of Artificial Sequence:  Enzymatic Nucleic Acid
cuuaguggggaggaaacucccuucaaggacaucguccgggagccucca

SEQ ID NO: 8646 - RNA, 48 nt, Artificial Sequence
  Description of Artificial Sequence:  Enzymatic Nucleic Acid
uggcauucggaggaaacucccuucaaggacaucguccggguuaguggc

SEQ ID NO: 8647 - RNA, 48 nt, Artificial Sequence
  Description of Artificial Sequence:  Enzymatic Nucleic Acid
cuggcauuggaggaaacucccuucaaggacaucguccgggcuuagugg

SEQ ID NO: 8648 - RNA, 48 nt, Artificial Sequence
  Description of Artificial Sequence:  Enzymatic Nucleic Acid
gagccuggggaggaaacucccuucaaggacaucguccgggauuccuua

SEQ ID NO: 8649 - RNA, 48 nt, Artificial Sequence
  Description of Artificial Sequence:  Enzymatic Nucleic Acid
uccagagcggaggaaacucccuucaaggacaucguccggguggcauuc

SEQ ID NO: 8650 - RNA, 48 nt, Artificial Sequence
  Description of Artificial Sequence:  Enzymatic Nucleic Acid
cuccagagggaggaaacucccuucaaggacaucguccgggcuggcauu

SEQ ID NO: 8651 - RNA, 48 nt, Artificial Sequence
  Description of Artificial Sequence:  Enzymatic Nucleic Acid
cgacccucggaggaaacucccuucaaggacaucguccgggagagccug

SEQ ID NO: 8652 - RNA, 48 nt, Artificial Sequence
  Description of Artificial Sequence:  Enzymatic Nucleic Acid
ccgacccuggaggaaacucccuucaaggacaucguccgggcagagccu

SEQ ID NO: 8653 - RNA, 48 nt, Artificial Sequence
  Description of Artificial Sequence:  Enzymatic Nucleic Acid
gcccgaccggaggaaacucccuucaaggacaucguccggguccagagc

SEQ ID NO: 8654 - RNA, 48 nt, Artificial Sequence
  Description of Artificial Sequence:  Enzymatic Nucleic Acid
ggcccgacggaggaaacucccuucaaggacaucguccgggcuccagag

SEQ ID NO: 8655 - RNA, 48 nt, Artificial Sequence
  Description of Artificial Sequence:  Enzymatic Nucleic Acid
gggcccgaggaggaaacucccuucaaggacaucguccgggccuccaga

SEQ ID NO: 8656 - RNA, 48 nt, Artificial Sequence
  Description of Artificial Sequence:  Enzymatic Nucleic Acid
cccgggccggaggaaacucccuucaaggacaucguccggggacccucc

SEQ ID NO: 8657 - RNA, 48 nt, Artificial Sequence
  Description of Artificial Sequence:  Enzymatic Nucleic Acid
gcccgggcggaggaaacucccuucaaggacaucguccgggcgacccuc

SEQ ID NO: 8658 - RNA, 48 nt, Artificial Sequence
  Description of Artificial Sequence:  Enzymatic Nucleic Acid
cgcccgggggaggaaacucccuucaaggacaucguccgggccgacccu

SEQ ID NO: 8659 - RNA, 48 nt, Artificial Sequence
  Description of Artificial Sequence:  Enzymatic Nucleic Acid
uggccgccggaggaaacucccuucaaggacaucguccggggggcccga

SEQ ID NO: 8660 - RNA, 48 nt, Artificial Sequence
  Description of Artificial Sequence:  Enzymatic Nucleic Acid
cuggccgcggaggaaacucccuucaaggacaucguccgggcgggcccg

SEQ ID NO: 8661 - RNA, 48 nt, Artificial Sequence
  Description of Artificial Sequence:  Enzymatic Nucleic Acid
gcuggccgggaggaaacucccuucaaggacaucguccgggccgggccc

SEQ ID NO: 8662 - RNA, 48 nt, Artificial Sequence
  Description of Artificial Sequence:  Enzymatic Nucleic Acid
ucgcuggcggaggaaacucccuucaaggacaucguccggggcccgggc

SEQ ID NO: 8663 - RNA, 48 nt, Artificial Sequence
  Description of Artificial Sequence:  Enzymatic Nucleic Acid
cucgcuggggaggaaacucccuucaaggacaucguccgggcgcccggg

SEQ ID NO: 8664 - RNA, 48 nt, Artificial Sequence
  Description of Artificial Sequence:  Enzymatic Nucleic Acid
ccugcucgggaggaaacucccuucaaggacaucguccggguggccgcc

SEQ ID NO: 8665 - RNA, 48 nt, Artificial Sequence
  Description of Artificial Sequence:  Enzymatic Nucleic Acid
cgccugcuggaggaaacucccuucaaggacaucguccggggcuggccg

SEQ ID NO: 8666 - RNA, 48 nt, Artificial Sequence
  Description of Artificial Sequence:  Enzymatic Nucleic Acid
cgcgccugggaggaaacucccuucaaggacaucguccgggucgcuggc

SEQ ID NO: 8667 - RNA, 48 nt, Artificial Sequence
  Description of Artificial Sequence:  Enzymatic Nucleic Acid
ugccgcgcggaggaaacucccuucaaggacaucguccgggugcucgcu

SEQ ID NO: 8668 - RNA, 48 nt, Artificial Sequence
  Description of Artificial Sequence:  Enzymatic Nucleic Acid
cugccgcgggaggaaacucccuucaaggacaucguccgggcugcucgc

SEQ ID NO: 8669 - RNA, 48 nt, Artificial Sequence
  Description of Artificial Sequence:  Enzymatic Nucleic Acid
agcugccgggaggaaacucccuucaaggacaucguccggggccugcuc

SEQ ID NO: 8670 - RNA, 48 nt, Artificial Sequence
  Description of Artificial Sequence:  Enzymatic Nucleic Acid
ccagcugcggaggaaacucccuucaaggacaucguccggggcgccugc

SEQ ID NO: 8671 - RNA, 48 nt, Artificial Sequence
  Description of Artificial Sequence:  Enzymatic Nucleic Acid
uccagcugggaggaaacucccuucaaggacaucguccgggcgcgccug

SEQ ID NO: 8672 - RNA, 48 nt, Artificial Sequence
  Description of Artificial Sequence:  Enzymatic Nucleic Acid
cucuccagggaggaaacucccuucaaggacaucguccgggugccgcgc

SEQ ID NO: 8673 - RNA, 48 nt, Artificial Sequence
  Description of Artificial Sequence:  Enzymatic Nucleic Acid
ucacucucggaggaaacucccuucaaggacaucguccgggagcugccg

SEQ ID NO: 8674 - RNA, 48 nt, Artificial Sequence
  Description of Artificial Sequence:  Enzymatic Nucleic Acid
cucacucuggaggaaacucccuucaaggacaucguccgggcagcugcc

SEQ ID NO: 8675 - RNA, 48 nt, Artificial Sequence
  Description of Artificial Sequence:  Enzymatic Nucleic Acid
cgcucacuggaggaaacucccuucaaggacaucguccggguccagcug

SEQ ID NO: 8676 - RNA, 48 nt, Artificial Sequence
  Description of Artificial Sequence:  Enzymatic Nucleic Acid
cgcgcucaggaggaaacucccuucaaggacaucguccgggucuccagc

SEQ ID NO: 8677 - RNA, 48 nt, Artificial Sequence
  Description of Artificial Sequence:  Enzymatic Nucleic Acid
cucgcgcuggaggaaacucccuucaaggacaucguccgggacucucca

SEQ ID NO: 8678 - RNA, 48 nt, Artificial Sequence
  Description of Artificial Sequence:  Enzymatic Nucleic Acid
gccucgcgggaggaaacucccuucaaggacaucguccgggucacucuc

SEQ ID NO: 8679 - RNA, 48 nt, Artificial Sequence
  Description of Artificial Sequence:  Enzymatic Nucleic Acid
gcgccucgggaggaaacucccuucaaggacaucguccggggcucacuc

SEQ ID NO: 8680 - RNA, 48 nt, Artificial Sequence
  Description of Artificial Sequence:  Enzymatic Nucleic Acid
cagcgccuggaggaaacucccuucaaggacaucguccggggcgcucac

SEQ ID NO: 8681 - RNA, 48 nt, Artificial Sequence
  Description of Artificial Sequence:  Enzymatic Nucleic Acid
ugcagcgcggaggaaacucccuucaaggacaucguccgggucgcgcuc

SEQ ID NO: 8682 - RNA, 48 nt, Artificial Sequence
  Description of Artificial Sequence:  Enzymatic Nucleic Acid
cugcagcgggaggaaacucccuucaaggacaucguccgggcucgcgcu

SEQ ID NO: 8683 - RNA, 48 nt, Artificial Sequence
  Description of Artificial Sequence:  Enzymatic Nucleic Acid
ugcugcagggaggaaacucccuucaaggacaucguccggggccucgcg

SEQ ID NO: 8684 - RNA, 48 nt, Artificial Sequence
  Description of Artificial Sequence:  Enzymatic Nucleic Acid
ugcugcugggaggaaacucccuucaaggacaucguccgggagcgccuc

SEQ ID NO: 8685 - RNA, 48 nt, Artificial Sequence
  Description of Artificial Sequence:  Enzymatic Nucleic Acid
ugcugcugggaggaaacucccuucaaggacaucguccgggugcagcgc

SEQ ID NO: 8686 - RNA, 48 nt, Artificial Sequence
  Description of Artificial Sequence:  Enzymatic Nucleic Acid
cugugcugggaggaaacucccuucaaggacaucguccgggugcugcag

SEQ ID NO: 8687 - RNA, 48 nt, Artificial Sequence
  Description of Artificial Sequence:  Enzymatic Nucleic Acid
acgcugugggaggaaacucccuucaaggacaucguccgggugcugcug

SEQ ID NO: 8688 - RNA, 48 nt, Artificial Sequence
  Description of Artificial Sequence:  Enzymatic Nucleic Acid
ccugcacgggaggaaacucccuucaaggacaucguccgggugugcugc

SEQ ID NO: 8689 - RNA, 48 nt, Artificial Sequence
  Description of Artificial Sequence:  Enzymatic Nucleic Acid
caccugcaggaggaaacucccuucaaggacaucguccggggcugugcu

SEQ ID NO: 8690 - RNA, 48 nt, Artificial Sequence
  Description of Artificial Sequence:  Enzymatic Nucleic Acid
uccaccugggaggaaacucccuucaaggacaucguccgggacgcugug

SEQ ID NO: 8691 - RNA, 48 nt, Artificial Sequence
  Description of Artificial Sequence:  Enzymatic Nucleic Acid
ugguccacggaggaaacucccuucaaggacaucguccgggugcacgcu

SEQ ID NO: 8692 - RNA, 48 nt, Artificial Sequence
  Description of Artificial Sequence:  Enzymatic Nucleic Acid
cugguccaggaggaaacucccuucaaggacaucguccgggcugcacgc

SEQ ID NO: 8693 - RNA, 48 nt, Artificial Sequence
  Description of Artificial Sequence:  Enzymatic Nucleic Acid
agcuggucggaggaaacucccuucaaggacaucguccgggaccugcac

SEQ ID NO: 8694 - RNA, 48 nt, Artificial Sequence
  Description of Artificial Sequence:  Enzymatic Nucleic Acid
cagcugguggaggaaacucccuucaaggacaucguccgggcaccugca

SEQ ID NO: 8695 - RNA, 48 nt, Artificial Sequence
  Description of Artificial Sequence:  Enzymatic Nucleic Acid
augcgcagggaggaaacucccuucaaggacaucguccgggugguccac

SEQ ID NO: 8696 - RNA, 48 nt, Artificial Sequence
  Description of Artificial Sequence:  Enzymatic Nucleic Acid
ugcaugcgggaggaaacucccuucaaggacaucguccgggagcugguc

SEQ ID NO: 8697 - RNA, 48 nt, Artificial Sequence
  Description of Artificial Sequence:  Enzymatic Nucleic Acid
ccugcaugggaggaaacucccuucaaggacaucguccggggcagcugg

SEQ ID NO: 8698 - RNA, 48 nt, Artificial Sequence
  Description of Artificial Sequence:  Enzymatic Nucleic Acid
uggcccugggaggaaacucccuucaaggacaucguccgggaugcgcag

SEQ ID NO: 8699 - RNA, 48 nt, Artificial Sequence
  Description of Artificial Sequence:  Enzymatic Nucleic Acid
cucuggccggaggaaacucccuucaaggacaucguccgggugcaugcg

SEQ ID NO: 8700 - RNA, 48 nt, Artificial Sequence
  Description of Artificial Sequence:  Enzymatic Nucleic Acid
gcucuggcggaggaaacucccuucaaggacaucguccgggcugcaugc

SEQ ID NO: 8701 - RNA, 48 nt, Artificial Sequence
  Description of Artificial Sequence:  Enzymatic Nucleic Acid
cgcucuggggaggaaacucccuucaaggacaucguccgggccugcaug

SEQ ID NO: 8702 - RNA, 48 nt, Artificial Sequence
  Description of Artificial Sequence:  Enzymatic Nucleic Acid
uccacgcuggaggaaacucccuucaaggacaucguccggguggcccug

SEQ ID NO: 8703 - RNA, 48 nt, Artificial Sequence
  Description of Artificial Sequence:  Enzymatic Nucleic Acid
ccuccacgggaggaaacucccuucaaggacaucguccgggucuggccc

SEQ ID NO: 8704 - RNA, 48 nt, Artificial Sequence
  Description of Artificial Sequence:  Enzymatic Nucleic Acid
ggccuccaggaggaaacucccuucaaggacaucguccggggcucuggc

SEQ ID NO: 8705 - RNA, 48 nt, Artificial Sequence
  Description of Artificial Sequence:  Enzymatic Nucleic Acid
gcggccucggaggaaacucccuucaaggacaucguccgggacgcucug

SEQ ID NO: 8706 - RNA, 48 nt, Artificial Sequence
  Description of Artificial Sequence:  Enzymatic Nucleic Acid
cgcggccuggaggaaacucccuucaaggacaucguccgggcacgcucu

SEQ ID NO: 8707 - RNA, 48 nt, Artificial Sequence
  Description of Artificial Sequence:  Enzymatic Nucleic Acid
agcgcggcggaggaaacucccuucaaggacaucguccggguccacgcu

SEQ ID NO: 8708 - RNA, 48 nt, Artificial Sequence
  Description of Artificial Sequence:  Enzymatic Nucleic Acid
gagcgcggggaggaaacucccuucaaggacaucguccgggcuccacgc

SEQ ID NO: 8709 - RNA, 48 nt, Artificial Sequence
  Description of Artificial Sequence:  Enzymatic Nucleic Acid
gcggagcgggaggaaacucccuucaaggacaucguccgggggccucca

SEQ ID NO: 8710 - RNA, 48 nt, Artificial Sequence
  Description of Artificial Sequence:  Enzymatic Nucleic Acid
augcggagggaggaaacucccuucaaggacaucguccggggcggccuc

SEQ ID NO: 8711 - RNA, 48 nt, Artificial Sequence
  Description of Artificial Sequence:  Enzymatic Nucleic Acid
gcuccaugggaggaaacucccuucaaggacaucguccgggggagcgcg

SEQ ID NO: 8712 - RNA, 48 nt, Artificial Sequence
  Description of Artificial Sequence:  Enzymatic Nucleic Acid
uggcgcucggaggaaacucccuucaaggacaucguccgggaugcggag

SEQ ID NO: 8713 - RNA, 48 nt, Artificial Sequence
  Description of Artificial Sequence:  Enzymatic Nucleic Acid
cuggcgcuggaggaaacucccuucaaggacaucguccgggcaugcgga

SEQ ID NO: 8714 - RNA, 48 nt, Artificial Sequence
  Description of Artificial Sequence:  Enzymatic Nucleic Acid
gccuggcgggaggaaacucccuucaaggacaucguccggguccaugcg

SEQ ID NO: 8715 - RNA, 48 nt, Artificial Sequence
  Description of Artificial Sequence:  Enzymatic Nucleic Acid
cggccuggggaggaaacucccuucaaggacaucguccggggcuccaug

SEQ ID NO: 8716 - RNA, 48 nt, Artificial Sequence
  Description of Artificial Sequence:  Enzymatic Nucleic Acid
gaggcggcggaggaaacucccuucaaggacaucguccggguggcgcuc

SEQ ID NO: 8717 - RNA, 48 nt, Artificial Sequence
  Description of Artificial Sequence:  Enzymatic Nucleic Acid
cgaggcggggaggaaacucccuucaaggacaucguccgggcuggcgcu

SEQ ID NO: 8718 - RNA, 48 nt, Artificial Sequence
  Description of Artificial Sequence:  Enzymatic Nucleic Acid
cuccgaggggaggaaacucccuucaaggacaucguccgggggccuggc

SEQ ID NO: 8719 - RNA, 48 nt, Artificial Sequence
  Description of Artificial Sequence:  Enzymatic Nucleic Acid
uucuccucggaggaaacucccuucaaggacaucguccggggaggcggc

SEQ ID NO: 8720 - RNA, 48 nt, Artificial Sequence
  Description of Artificial Sequence:  Enzymatic Nucleic Acid
cuucuccuggaggaaacucccuucaaggacaucguccgggcgaggcgg

SEQ ID NO: 8721 - RNA, 48 nt, Artificial Sequence
  Description of Artificial Sequence:  Enzymatic Nucleic Acid
cucuucucggaggaaacucccuucaaggacaucguccggguccgaggc

SEQ ID NO: 8722 - RNA, 48 nt, Artificial Sequence
  Description of Artificial Sequence:  Enzymatic Nucleic Acid
ccucuucuggaggaaacucccuucaaggacaucguccgggcuccgagg

SEQ ID NO: 8723 - RNA, 48 nt, Artificial Sequence
  Description of Artificial Sequence:  Enzymatic Nucleic Acid
uuccucuuggaggaaacucccuucaaggacaucguccggguccuccga

SEQ ID NO: 8724 - RNA, 48 nt, Artificial Sequence
  Description of Artificial Sequence:  Enzymatic Nucleic Acid
agcuuccuggaggaaacucccuucaaggacaucguccggguucuccuc

SEQ ID NO: 8725 - RNA, 48 nt, Artificial Sequence
  Description of Artificial Sequence:  Enzymatic Nucleic Acid
ccagcuucggaggaaacucccuucaaggacaucguccgggucuucucc

SEQ ID NO: 8726 - RNA, 48 nt, Artificial Sequence
  Description of Artificial Sequence:  Enzymatic Nucleic Acid
gccagcuuggaggaaacucccuucaaggacaucguccgggcucuucuc

SEQ ID NO: 8727 - RNA, 48 nt, Artificial Sequence
  Description of Artificial Sequence:  Enzymatic Nucleic Acid
ugggccagggaggaaacucccuucaaggacaucguccggguuccucuu

SEQ ID NO: 8728 - RNA, 48 nt, Artificial Sequence
  Description of Artificial Sequence:  Enzymatic Nucleic Acid
aacugggcggaggaaacucccuucaaggacaucguccgggagcuuccu

SEQ ID NO: 8729 - RNA, 48 nt, Artificial Sequence
  Description of Artificial Sequence:  Enzymatic Nucleic Acid
caacugggggaggaaacucccuucaaggacaucguccgggcagcuucc

SEQ ID NO: 8730 - RNA, 48 nt, Artificial Sequence
  Description of Artificial Sequence:  Enzymatic Nucleic Acid
accugcaaggaggaaacucccuucaaggacaucguccgggugggccag

SEQ ID NO: 8731 - RNA, 48 nt, Artificial Sequence
  Description of Artificial Sequence:  Enzymatic Nucleic Acid
gccaccugggaggaaacucccuucaaggacaucguccgggaacugggc

SEQ ID NO: 8732 - RNA, 48 nt, Artificial Sequence
  Description of Artificial Sequence:  Enzymatic Nucleic Acid
uaggccacggaggaaacucccuucaaggacaucguccgggugcaacug

SEQ ID NO: 8733 - RNA, 48 nt, Artificial Sequence
  Description of Artificial Sequence:  Enzymatic Nucleic Acid
auaggccaggaggaaacucccuucaaggacaucguccgggcugcaacu

SEQ ID NO: 8734 - RNA, 48 nt, Artificial Sequence
  Description of Artificial Sequence:  Enzymatic Nucleic Acid
ugauaggcggaggaaacucccuucaaggacaucguccgggaccugcaa

SEQ ID NO: 8735 - RNA, 48 nt, Artificial Sequence
  Description of Artificial Sequence:  Enzymatic Nucleic Acid
gugauaggggaggaaacucccuucaaggacaucguccgggcaccugca

SEQ ID NO: 8736 - RNA, 48 nt, Artificial Sequence
  Description of Artificial Sequence:  Enzymatic Nucleic Acid
uggaagagggaggaaacucccuucaaggacaucguccggguggugaua

SEQ ID NO: 8737 - RNA, 48 nt, Artificial Sequence
  Description of Artificial Sequence:  Enzymatic Nucleic Acid
gucguauuggaggaaacucccuucaaggacaucguccggguuggaaga

SEQ ID NO: 8738 - RNA, 48 nt, Artificial Sequence
  Description of Artificial Sequence:  Enzymatic Nucleic Acid
gugguuguggaggaaacucccuucaaggacaucguccgggguauucuu

SEQ ID NO: 8739 - RNA, 48 nt, Artificial Sequence
  Description of Artificial Sequence:  Enzymatic Nucleic Acid
acgcugcuggaggaaacucccuucaaggacaucguccggguugaugug

SEQ ID NO: 8740 - RNA, 48 nt, Artificial Sequence
  Description of Artificial Sequence:  Enzymatic Nucleic Acid
ccacgcugggaggaaacucccuucaaggacaucguccgggucuugaug

SEQ ID NO: 8741 - RNA, 48 nt, Artificial Sequence
  Description of Artificial Sequence:  Enzymatic Nucleic Acid
ccaccacgggaggaaacucccuucaaggacaucguccgggugcucuug

SEQ ID NO: 8742 - RNA, 48 nt, Artificial Sequence
  Description of Artificial Sequence:  Enzymatic Nucleic Acid
gcccaccaggaggaaacucccuucaaggacaucguccggggcugcucu

SEQ ID NO: 8743 - RNA, 48 nt, Artificial Sequence
  Description of Artificial Sequence:  Enzymatic Nucleic Acid
cugcccacggaggaaacucccuucaaggacaucguccgggacgcugcu

SEQ ID NO: 8744 - RNA, 48 nt, Artificial Sequence
  Description of Artificial Sequence:  Enzymatic Nucleic Acid
acugcccaggaggaaacucccuucaaggacaucguccgggcacgcugc

SEQ ID NO: 8745 - RNA, 48 nt, Artificial Sequence
  Description of Artificial Sequence:  Enzymatic Nucleic Acid
ucacugccggaggaaacucccuucaaggacaucguccgggaccacgcu

SEQ ID NO: 8746 - RNA, 48 nt, Artificial Sequence
  Description of Artificial Sequence:  Enzymatic Nucleic Acid
cucacugcggaggaaacucccuucaaggacaucguccgggcaccacgc

SEQ ID NO: 8747 - RNA, 48 nt, Artificial Sequence
  Description of Artificial Sequence:  Enzymatic Nucleic Acid
gcucacugggaggaaacucccuucaaggacaucguccgggccaccacg

SEQ ID NO: 8748 - RNA, 48 nt, Artificial Sequence
  Description of Artificial Sequence:  Enzymatic Nucleic Acid
uccgcucaggaggaaacucccuucaaggacaucguccgggugcccacc

SEQ ID NO: 8749 - RNA, 48 nt, Artificial Sequence
  Description of Artificial Sequence:  Enzymatic Nucleic Acid
cuuccgcuggaggaaacucccuucaaggacaucguccgggacugccca

SEQ ID NO: 8750 - RNA, 48 nt, Artificial Sequence
  Description of Artificial Sequence:  Enzymatic Nucleic Acid
cgcuuccgggaggaaacucccuucaaggacaucguccgggucacugcc

SEQ ID NO: 8751 - RNA, 48 nt, Artificial Sequence
  Description of Artificial Sequence:  Enzymatic Nucleic Acid
cucgcuucggaggaaacucccuucaaggacaucguccggggcucacug

SEQ ID NO: 8752 - RNA, 48 nt, Artificial Sequence
  Description of Artificial Sequence:  Enzymatic Nucleic Acid
ccucgcuuggaggaaacucccuucaaggacaucguccgggcgcucacu

SEQ ID NO: 8753 - RNA, 48 nt, Artificial Sequence
  Description of Artificial Sequence:  Enzymatic Nucleic Acid
auuccucgggaggaaacucccuucaaggacaucguccggguuccgcuc

SEQ ID NO: 8754 - RNA, 48 nt, Artificial Sequence
  Description of Artificial Sequence:  Enzymatic Nucleic Acid
gcauuccuggaggaaacucccuucaaggacaucguccggggcuuccgc

SEQ ID NO: 8755 - RNA, 48 nt, Artificial Sequence
  Description of Artificial Sequence:  Enzymatic Nucleic Acid
cugcauucggaggaaacucccuucaaggacaucguccgggucgcuucc

SEQ ID NO: 8756 - RNA, 48 nt, Artificial Sequence
  Description of Artificial Sequence:  Enzymatic Nucleic Acid
gcugcauuggaggaaacucccuucaaggacaucguccgggcucgcuuc

SEQ ID NO: 8757 - RNA, 48 nt, Artificial Sequence
  Description of Artificial Sequence:  Enzymatic Nucleic Acid
uccagcugggaggaaacucccuucaaggacaucguccgggauuccucg

SEQ ID NO: 8758 - RNA, 48 nt, Artificial Sequence
  Description of Artificial Sequence:  Enzymatic Nucleic Acid
ucuuccagggaggaaacucccuucaaggacaucguccgggugcauucc

SEQ ID NO: 8759 - RNA, 48 nt, Artificial Sequence
  Description of Artificial Sequence:  Enzymatic Nucleic Acid
agaucuucggaggaaacucccuucaaggacaucguccgggagcugcau

SEQ ID NO: 8760 - RNA, 48 nt, Artificial Sequence
  Description of Artificial Sequence:  Enzymatic Nucleic Acid
gagaucuuggaggaaacucccuucaaggacaucguccgggcagcugca

SEQ ID NO: 8761 - RNA, 48 nt, Artificial Sequence
  Description of Artificial Sequence:  Enzymatic Nucleic Acid
uuugagauggaggaaacucccuucaaggacaucguccggguuccagcu

SEQ ID NO: 8762 - RNA, 48 nt, Artificial Sequence
  Description of Artificial Sequence:  Enzymatic Nucleic Acid
uggagcugggaggaaacucccuucaaggacaucguccggguguuugag

SEQ ID NO: 8763 - RNA, 48 nt, Artificial Sequence
  Description of Artificial Sequence:  Enzymatic Nucleic Acid
ugcuggagggaggaaacucccuucaaggacaucguccgggugcuguuu

SEQ ID NO: 8764 - RNA, 48 nt, Artificial Sequence
  Description of Artificial Sequence:  Enzymatic Nucleic Acid
ucggccugggaggaaacucccuucaaggacaucguccggguggagcug

SEQ ID NO: 8765 - RNA, 48 nt, Artificial Sequence
  Description of Artificial Sequence:  Enzymatic Nucleic Acid
uccucggcggaggaaacucccuucaaggacaucguccgggugcuggag

SEQ ID NO: 8766 - RNA, 48 nt, Artificial Sequence
  Description of Artificial Sequence:  Enzymatic Nucleic Acid
cuccucggggaggaaacucccuucaaggacaucguccgggcugcugga

SEQ ID NO: 8767 - RNA, 48 nt, Artificial Sequence
  Description of Artificial Sequence:  Enzymatic Nucleic Acid
ggccuccuggaggaaacucccuucaaggacaucguccgggggccugcu

SEQ ID NO: 8768 - RNA, 48 nt, Artificial Sequence
  Description of Artificial Sequence:  Enzymatic Nucleic Acid
agggccucggaggaaacucccuucaaggacaucguccgggucggccug

SEQ ID NO: 8769 - RNA, 48 nt, Artificial Sequence
  Description of Artificial Sequence:  Enzymatic Nucleic Acid
cagggccuggaggaaacucccuucaaggacaucguccgggcucggccu

SEQ ID NO: 8770 - RNA, 48 nt, Artificial Sequence
  Description of Artificial Sequence:  Enzymatic Nucleic Acid
accagggcggaggaaacucccuucaaggacaucguccggguccucggc

SEQ ID NO: 8771 - RNA, 48 nt, Artificial Sequence
  Description of Artificial Sequence:  Enzymatic Nucleic Acid
caccagggggaggaaacucccuucaaggacaucguccgggcuccucgg

SEQ ID NO: 8772 - RNA, 48 nt, Artificial Sequence
  Description of Artificial Sequence:  Enzymatic Nucleic Acid
uuggccacggaggaaacucccuucaaggacaucguccgggagggccuc

SEQ ID NO: 8773 - RNA, 48 nt, Artificial Sequence
  Description of Artificial Sequence:  Enzymatic Nucleic Acid
uuuggccaggaggaaacucccuucaaggacaucguccgggcagggccu

SEQ ID NO: 8774 - RNA, 48 nt, Artificial Sequence
  Description of Artificial Sequence:  Enzymatic Nucleic Acid
uguuuggcggaggaaacucccuucaaggacaucguccgggaccagggc

SEQ ID NO: 8775 - RNA, 48 nt, Artificial Sequence
  Description of Artificial Sequence:  Enzymatic Nucleic Acid
cuguuuggggaggaaacucccuucaaggacaucguccgggcaccaggg

SEQ ID NO: 8776 - RNA, 48 nt, Artificial Sequence
  Description of Artificial Sequence:  Enzymatic Nucleic Acid
aucaccucggaggaaacucccuucaaggacaucguccggguguuuggc

SEQ ID NO: 8777 - RNA, 48 nt, Artificial Sequence
  Description of Artificial Sequence:  Enzymatic Nucleic Acid
gaucaccuggaggaaacucccuucaaggacaucguccgggcuguuugg

SEQ ID NO: 8778 - RNA, 48 nt, Artificial Sequence
  Description of Artificial Sequence:  Enzymatic Nucleic Acid
ucgaucacggaggaaacucccuucaaggacaucguccggguccuguuu

SEQ ID NO: 8779 - RNA, 48 nt, Artificial Sequence
  Description of Artificial Sequence:  Enzymatic Nucleic Acid
aucgaucaggaggaaacucccuucaaggacaucguccgggcuccuguu

SEQ ID NO: 8780 - RNA, 48 nt, Artificial Sequence
  Description of Artificial Sequence:  Enzymatic Nucleic Acid
uuaucgauggaggaaacucccuucaaggacaucguccgggaccuccug

SEQ ID NO: 8781 - RNA, 48 nt, Artificial Sequence
  Description of Artificial Sequence:  Enzymatic Nucleic Acid
cagcuuauggaggaaacucccuucaaggacaucguccggggaucaccu

SEQ ID NO: 8782 - RNA, 48 nt, Artificial Sequence
  Description of Artificial Sequence:  Enzymatic Nucleic Acid
uccuucagggaggaaacucccuucaaggacaucguccggguuaucgau

SEQ ID NO: 8783 - RNA, 48 nt, Artificial Sequence
  Description of Artificial Sequence:  Enzymatic Nucleic Acid
uccuccuuggaggaaacucccuucaaggacaucguccgggagcuuauc

SEQ ID NO: 8784 - RNA, 48 nt, Artificial Sequence
  Description of Artificial Sequence:  Enzymatic Nucleic Acid
gccuccucggaggaaacucccuucaaggacaucguccggguucagcuu

SEQ ID NO: 8785 - RNA, 48 nt, Artificial Sequence
  Description of Artificial Sequence:  Enzymatic Nucleic Acid
ggccuccuggaggaaacucccuucaaggacaucguccgggcuucagcu

SEQ ID NO: 8786 - RNA, 48 nt, Artificial Sequence
  Description of Artificial Sequence:  Enzymatic Nucleic Acid
ucggccucggaggaaacucccuucaaggacaucguccggguccuucag

SEQ ID NO: 8787 - RNA, 48 nt, Artificial Sequence
  Description of Artificial Sequence:  Enzymatic Nucleic Acid
cucggccuggaggaaacucccuucaaggacaucguccgggcuccuuca

SEQ ID NO: 8788 - RNA, 48 nt, Artificial Sequence
  Description of Artificial Sequence:  Enzymatic Nucleic Acid
ugcucggcggaggaaacucccuucaaggacaucguccggguccuccuu

SEQ ID NO: 8789 - RNA, 48 nt, Artificial Sequence
  Description of Artificial Sequence:  Enzymatic Nucleic Acid
cugcucggggaggaaacucccuucaaggacaucguccgggcuccuccu

SEQ ID NO: 8790 - RNA, 48 nt, Artificial Sequence
  Description of Artificial Sequence:  Enzymatic Nucleic Acid
gugcugcuggaggaaacucccuucaaggacaucguccgggggccuccu

SEQ ID NO: 8791 - RNA, 48 nt, Artificial Sequence
  Description of Artificial Sequence:  Enzymatic Nucleic Acid
uugugcugggaggaaacucccuucaaggacaucguccgggucggccuc

SEQ ID NO: 8792 - RNA, 48 nt, Artificial Sequence
  Description of Artificial Sequence:  Enzymatic Nucleic Acid
aucuugugggaggaaacucccuucaaggacaucguccgggugcucggc

SEQ ID NO: 8793 - RNA, 48 nt, Artificial Sequence
  Description of Artificial Sequence:  Enzymatic Nucleic Acid
aucacaauggaggaaacucccuucaaggacaucguccggguugugcug

SEQ ID NO: 8794 - RNA, 48 nt, Artificial Sequence
  Description of Artificial Sequence:  Enzymatic Nucleic Acid
cuccaucaggaggaaacucccuucaaggacaucguccgggaaucuugu

SEQ ID NO: 8795 - RNA, 48 nt, Artificial Sequence
  Description of Artificial Sequence:  Enzymatic Nucleic Acid
gucuccauggaggaaacucccuucaaggacaucguccgggacaaucuu

SEQ ID NO: 8796 - RNA, 48 nt, Artificial Sequence
  Description of Artificial Sequence:  Enzymatic Nucleic Acid
acggucucggaggaaacucccuucaaggacaucguccgggaucacaau

SEQ ID NO: 8797 - RNA, 48 nt, Artificial Sequence
  Description of Artificial Sequence:  Enzymatic Nucleic Acid
aacggucuggaggaaacucccuucaaggacaucguccgggcaucacaa

SEQ ID NO: 8798 - RNA, 48 nt, Artificial Sequence
  Description of Artificial Sequence:  Enzymatic Nucleic Acid
ggaacgguggaggaaacucccuucaaggacaucguccggguccaucac

SEQ ID NO: 8799 - RNA, 48 nt, Artificial Sequence
  Description of Artificial Sequence:  Enzymatic Nucleic Acid
caccggaaggaggaaacucccuucaaggacaucguccgggggucucca

SEQ ID NO: 8800 - RNA, 48 nt, Artificial Sequence
  Description of Artificial Sequence:  Enzymatic Nucleic Acid
uucagcacggaggaaacucccuucaaggacaucguccgggggaacggu

SEQ ID NO: 8801 - RNA, 48 nt, Artificial Sequence
  Description of Artificial Sequence:  Enzymatic Nucleic Acid
cuucagcaggaggaaacucccuucaaggacaucguccgggcggaacgg

SEQ ID NO: 8802 - RNA, 48 nt, Artificial Sequence
  Description of Artificial Sequence:  Enzymatic Nucleic Acid
gccuucagggaggaaacucccuucaaggacaucguccgggaccggaac

SEQ ID NO: 8803 - RNA, 48 nt, Artificial Sequence
  Description of Artificial Sequence:  Enzymatic Nucleic Acid
ugggccuuggaggaaacucccuucaaggacaucguccgggagcaccgg

SEQ ID NO: 8804 - RNA, 48 nt, Artificial Sequence
  Description of Artificial Sequence:  Enzymatic Nucleic Acid
gccugggcggaggaaacucccuucaaggacaucguccggguucagcac

SEQ ID NO: 8805 - RNA, 48 nt, Artificial Sequence
  Description of Artificial Sequence:  Enzymatic Nucleic Acid
cgccugggggaggaaacucccuucaaggacaucguccgggcuucagca

SEQ ID NO: 8806 - RNA, 48 nt, Artificial Sequence
  Description of Artificial Sequence:  Enzymatic Nucleic Acid
auauccgcggaggaaacucccuucaaggacaucguccgggugggccuu

SEQ ID NO: 8807 - RNA, 48 nt, Artificial Sequence
  Description of Artificial Sequence:  Enzymatic Nucleic Acid
gauauccgggaggaaacucccuucaaggacaucguccgggcugggccu

SEQ ID NO: 8808 - RNA, 48 nt, Artificial Sequence
  Description of Artificial Sequence:  Enzymatic Nucleic Acid
uagauaucggaggaaacucccuucaaggacaucguccggggccugggc

SEQ ID NO: 8809 - RNA, 48 nt, Artificial Sequence
  Description of Artificial Sequence:  Enzymatic Nucleic Acid
guagauauggaggaaacucccuucaaggacaucguccgggcgccuggg

SEQ ID NO: 8810 - RNA, 48 nt, Artificial Sequence
  Description of Artificial Sequence:  Enzymatic Nucleic Acid
aaguccgcggaggaaacucccuucaaggacaucguccggguuguagau

SEQ ID NO: 8811 - RNA, 48 nt, Artificial Sequence
  Description of Artificial Sequence:  Enzymatic Nucleic Acid
gaaguccgggaggaaacucccuucaaggacaucguccgggcuuguaga

SEQ ID NO: 8812 - RNA, 48 nt, Artificial Sequence
  Description of Artificial Sequence:  Enzymatic Nucleic Acid
uggaagucggaggaaacucccuucaaggacaucguccggggccuugua

SEQ ID NO: 8813 - RNA, 48 nt, Artificial Sequence
  Description of Artificial Sequence:  Enzymatic Nucleic Acid
cuggaaguggaggaaacucccuucaaggacaucguccgggcgccuugu

SEQ ID NO: 8814 - RNA, 48 nt, Artificial Sequence
  Description of Artificial Sequence:  Enzymatic Nucleic Acid
cucucagcggaggaaacucccuucaaggacaucguccggguggaaguc

SEQ ID NO: 8815 - RNA, 48 nt, Artificial Sequence
  Description of Artificial Sequence:  Enzymatic Nucleic Acid
ccucucagggaggaaacucccuucaaggacaucguccgggcuggaagu

SEQ ID NO: 8816 - RNA, 48 nt, Artificial Sequence
  Description of Artificial Sequence:  Enzymatic Nucleic Acid
cugccucuggaggaaacucccuucaaggacaucguccgggagccugga

SEQ ID NO: 8817 - RNA, 48 nt, Artificial Sequence
  Description of Artificial Sequence:  Enzymatic Nucleic Acid
gccugccuggaggaaacucccuucaaggacaucguccgggucagccug

SEQ ID NO: 8818 - RNA, 48 nt, Artificial Sequence
  Description of Artificial Sequence:  Enzymatic Nucleic Acid
gggccugcggaggaaacucccuucaaggacaucguccgggucucagcc

SEQ ID NO: 8819 - RNA, 48 nt, Artificial Sequence
  Description of Artificial Sequence:  Enzymatic Nucleic Acid
cgggccugggaggaaacucccuucaaggacaucguccgggcucucagc

SEQ ID NO: 8820 - RNA, 48 nt, Artificial Sequence
  Description of Artificial Sequence:  Enzymatic Nucleic Acid
ucccgggcggaggaaacucccuucaaggacaucguccgggugccucuc

SEQ ID NO: 8821 - RNA, 48 nt, Artificial Sequence
  Description of Artificial Sequence:  Enzymatic Nucleic Acid
cucccgggggaggaaacucccuucaaggacaucguccgggcugccucu

SEQ ID NO: 8822 - RNA, 48 nt, Artificial Sequence
  Description of Artificial Sequence:  Enzymatic Nucleic Acid
gcuucuccggaggaaacucccuucaaggacaucguccggggggccugc

SEQ ID NO: 8823 - RNA, 48 nt, Artificial Sequence
  Description of Artificial Sequence:  Enzymatic Nucleic Acid
agcuucucggaggaaacucccuucaaggacaucguccgggcgggccug

SEQ ID NO: 8824 - RNA, 48 nt, Artificial Sequence
  Description of Artificial Sequence:  Enzymatic Nucleic Acid
cagcuucuggaggaaacucccuucaaggacaucguccgggccgggccu

SEQ ID NO: 8825 - RNA, 48 nt, Artificial Sequence
  Description of Artificial Sequence:  Enzymatic Nucleic Acid
gccagcuuggaggaaacucccuucaaggacaucguccgggucccgggc

SEQ ID NO: 8826 - RNA, 48 nt, Artificial Sequence
  Description of Artificial Sequence:  Enzymatic Nucleic Acid
ucggccagggaggaaacucccuucaaggacaucguccggguucucccg

SEQ ID NO: 8827 - RNA, 48 nt, Artificial Sequence
  Description of Artificial Sequence:  Enzymatic Nucleic Acid
uucucggcggaggaaacucccuucaaggacaucguccgggagcuucuc

SEQ ID NO: 8828 - RNA, 48 nt, Artificial Sequence
  Description of Artificial Sequence:  Enzymatic Nucleic Acid
cuucucggggaggaaacucccuucaaggacaucguccgggcagcuucu

SEQ ID NO: 8829 - RNA, 48 nt, Artificial Sequence
  Description of Artificial Sequence:  Enzymatic Nucleic Acid
cuucuucuggaggaaacucccuucaaggacaucguccgggggccagcu

SEQ ID NO: 8830 - RNA, 48 nt, Artificial Sequence
  Description of Artificial Sequence:  Enzymatic Nucleic Acid
uccuucuuggaggaaacucccuucaaggacaucguccgggucggccag

SEQ ID NO: 8831 - RNA, 48 nt, Artificial Sequence
  Description of Artificial Sequence:  Enzymatic Nucleic Acid
agcuccuuggaggaaacucccuucaaggacaucguccggguucucggc

SEQ ID NO: 8832 - RNA, 48 nt, Artificial Sequence
  Description of Artificial Sequence:  Enzymatic Nucleic Acid
aggagcucggaggaaacucccuucaaggacaucguccggguucuucuc

SEQ ID NO: 8833 - RNA, 48 nt, Artificial Sequence
  Description of Artificial Sequence:  Enzymatic Nucleic Acid
caggagcuggaggaaacucccuucaaggacaucguccgggcuucuucu

SEQ ID NO: 8834 - RNA, 48 nt, Artificial Sequence
  Description of Artificial Sequence:  Enzymatic Nucleic Acid
ugcaggagggaggaaacucccuucaaggacaucguccggguccuucuu

SEQ ID NO: 8835 - RNA, 48 nt, Artificial Sequence
  Description of Artificial Sequence:  Enzymatic Nucleic Acid
ugcuccugggaggaaacucccuucaaggacaucguccgggaggagcuc

SEQ ID NO: 8836 - RNA, 48 nt, Artificial Sequence
  Description of Artificial Sequence:  Enzymatic Nucleic Acid
agcugcucggaggaaacucccuucaaggacaucguccgggugcaggag

SEQ ID NO: 8837 - RNA, 48 nt, Artificial Sequence
  Description of Artificial Sequence:  Enzymatic Nucleic Acid
cagcugcuggaggaaacucccuucaaggacaucguccgggcugcagga

SEQ ID NO: 8838 - RNA, 48 nt, Artificial Sequence
  Description of Artificial Sequence:  Enzymatic Nucleic Acid
uccagcugggaggaaacucccuucaaggacaucguccggguccugcag

SEQ ID NO: 8839 - RNA, 48 nt, Artificial Sequence
  Description of Artificial Sequence:  Enzymatic Nucleic Acid
ugcuccagggaggaaacucccuucaaggacaucguccgggugcuccug

SEQ ID NO: 8840 - RNA, 48 nt, Artificial Sequence
  Description of Artificial Sequence:  Enzymatic Nucleic Acid
agcugcucggaggaaacucccuucaaggacaucguccgggagcugcuc

SEQ ID NO: 8841 - RNA, 48 nt, Artificial Sequence
  Description of Artificial Sequence:  Enzymatic Nucleic Acid
cagcugcuggaggaaacucccuucaaggacaucguccgggcagcugcu

SEQ ID NO: 8842 - RNA, 48 nt, Artificial Sequence
  Description of Artificial Sequence:  Enzymatic Nucleic Acid
ugcagcugggaggaaacucccuucaaggacaucguccggguccagcug

SEQ ID NO: 8843 - RNA, 48 nt, Artificial Sequence
  Description of Artificial Sequence:  Enzymatic Nucleic Acid
cucugcagggaggaaacucccuucaaggacaucguccgggugcuccag

SEQ ID NO: 8844 - RNA, 48 nt, Artificial Sequence
  Description of Artificial Sequence:  Enzymatic Nucleic Acid
ucccucugggaggaaacucccuucaaggacaucguccgggagcugcuc

SEQ ID NO: 8845 - RNA, 48 nt, Artificial Sequence
  Description of Artificial Sequence:  Enzymatic Nucleic Acid
uacucccuggaggaaacucccuucaaggacaucguccgggugcagcug

SEQ ID NO: 8846 - RNA, 48 nt, Artificial Sequence
  Description of Artificial Sequence:  Enzymatic Nucleic Acid
uguacuccggaggaaacucccuucaaggacaucguccgggucugcagc

SEQ ID NO: 8847 - RNA, 48 nt, Artificial Sequence
  Description of Artificial Sequence:  Enzymatic Nucleic Acid
cuguacucggaggaaacucccuucaaggacaucguccgggcucugcag

SEQ ID NO: 8848 - RNA, 48 nt, Artificial Sequence
  Description of Artificial Sequence:  Enzymatic Nucleic Acid
gcuguacuggaggaaacucccuucaaggacaucguccgggccucugca

SEQ ID NO: 8849 - RNA, 48 nt, Artificial Sequence
  Description of Artificial Sequence:  Enzymatic Nucleic Acid
uugcuguaggaggaaacucccuucaaggacaucguccgggucccucug

SEQ ID NO: 8850 - RNA, 48 nt, Artificial Sequence
  Description of Artificial Sequence:  Enzymatic Nucleic Acid
ucaguuugggaggaaacucccuucaaggacaucguccggguguacucc

SEQ ID NO: 8851 - RNA, 48 nt, Artificial Sequence
  Description of Artificial Sequence:  Enzymatic Nucleic Acid
cuggccuuggaggaaacucccuucaaggacaucguccgggaguuugcu

SEQ ID NO: 8852 - RNA, 48 nt, Artificial Sequence
  Description of Artificial Sequence:  Enzymatic Nucleic Acid
cagcuggcggaggaaacucccuucaaggacaucguccggguucaguuu

SEQ ID NO: 8853 - RNA, 48 nt, Artificial Sequence
  Description of Artificial Sequence:  Enzymatic Nucleic Acid
acagcuggggaggaaacucccuucaaggacaucguccgggcuucaguu

SEQ ID NO: 8854 - RNA, 48 nt, Artificial Sequence
  Description of Artificial Sequence:  Enzymatic Nucleic Acid
ccugacagggaggaaacucccuucaaggacaucguccggguggccuuc

SEQ ID NO: 8855 - RNA, 48 nt, Artificial Sequence
  Description of Artificial Sequence:  Enzymatic Nucleic Acid
acuccugaggaggaaacucccuucaaggacaucguccgggagcuggcc

SEQ ID NO: 8856 - RNA, 48 nt, Artificial Sequence
  Description of Artificial Sequence:  Enzymatic Nucleic Acid
gccgacucggaggaaacucccuucaaggacaucguccgggugacagcu

SEQ ID NO: 8857 - RNA, 48 nt, Artificial Sequence
  Description of Artificial Sequence:  Enzymatic Nucleic Acid
ggccgacuggaggaaacucccuucaaggacaucguccgggcugacagc

SEQ ID NO: 8858 - RNA, 48 nt, Artificial Sequence
  Description of Artificial Sequence:  Enzymatic Nucleic Acid
cuggccgaggaggaaacucccuucaaggacaucguccggguccugaca

SEQ ID NO: 8859 - RNA, 48 nt, Artificial Sequence
  Description of Artificial Sequence:  Enzymatic Nucleic Acid
auccuggcggaggaaacucccuucaaggacaucguccggggacuccug

SEQ ID NO: 8860 - RNA, 48 nt, Artificial Sequence
  Description of Artificial Sequence:  Enzymatic Nucleic Acid
gauccuggggaggaaacucccuucaaggacaucguccgggcgacuccu

SEQ ID NO: 8861 - RNA, 48 nt, Artificial Sequence
  Description of Artificial Sequence:  Enzymatic Nucleic Acid
ccucgaucggaggaaacucccuucaaggacaucguccggguggccgac

SEQ ID NO: 8862 - RNA, 48 nt, Artificial Sequence
  Description of Artificial Sequence:  Enzymatic Nucleic Acid
uccucgauggaggaaacucccuucaaggacaucguccgggcuggccga

SEQ ID NO: 8863 - RNA, 48 nt, Artificial Sequence
  Description of Artificial Sequence:  Enzymatic Nucleic Acid
cauguccuggaggaaacucccuucaaggacaucguccggggauccugg

SEQ ID NO: 8864 - RNA, 48 nt, Artificial Sequence
  Description of Artificial Sequence:  Enzymatic Nucleic Acid
cucaugucggaggaaacucccuucaaggacaucguccgggucgauccu

SEQ ID NO: 8865 - RNA, 48 nt, Artificial Sequence
  Description of Artificial Sequence:  Enzymatic Nucleic Acid
ccucauguggaggaaacucccuucaaggacaucguccgggcucgaucc

SEQ ID NO: 8866 - RNA, 48 nt, Artificial Sequence
  Description of Artificial Sequence:  Enzymatic Nucleic Acid
cgcuuccuggaggaaacucccuucaaggacaucguccgggauguccuc

SEQ ID NO: 8867 - RNA, 48 nt, Artificial Sequence
  Description of Artificial Sequence:  Enzymatic Nucleic Acid
gccgcuucggaggaaacucccuucaaggacaucguccgggucaugucc

SEQ ID NO: 8868 - RNA, 48 nt, Artificial Sequence
  Description of Artificial Sequence:  Enzymatic Nucleic Acid
ugccgcuuggaggaaacucccuucaaggacaucguccgggcucauguc

SEQ ID NO: 8869 - RNA, 48 nt, Artificial Sequence
  Description of Artificial Sequence:  Enzymatic Nucleic Acid
acaugccgggaggaaacucccuucaaggacaucguccggguuccucau

SEQ ID NO: 8870 - RNA, 48 nt, Artificial Sequence
  Description of Artificial Sequence:  Enzymatic Nucleic Acid
cgacaugcggaggaaacucccuucaaggacaucguccggggcuuccuc

SEQ ID NO: 8871 - RNA, 48 nt, Artificial Sequence
  Description of Artificial Sequence:  Enzymatic Nucleic Acid
ucgacaugggaggaaacucccuucaaggacaucguccgggcgcuuccu

SEQ ID NO: 8872 - RNA, 48 nt, Artificial Sequence
  Description of Artificial Sequence:  Enzymatic Nucleic Acid
gaccucgaggaggaaacucccuucaaggacaucguccgggaugccgcu

SEQ ID NO: 8873 - RNA, 48 nt, Artificial Sequence
  Description of Artificial Sequence:  Enzymatic Nucleic Acid
ggagaccuggaggaaacucccuucaaggacaucguccggggacaugcc

SEQ ID NO: 8874 - RNA, 48 nt, Artificial Sequence
  Description of Artificial Sequence:  Enzymatic Nucleic Acid
ugggagacggaggaaacucccuucaaggacaucguccgggucgacaug

SEQ ID NO: 8875 - RNA, 48 nt, Artificial Sequence
  Description of Artificial Sequence:  Enzymatic Nucleic Acid
cugggagaggaggaaacucccuucaaggacaucguccgggcucgacau

SEQ ID NO: 8876 - RNA, 48 nt, Artificial Sequence
  Description of Artificial Sequence:  Enzymatic Nucleic Acid
aagggggcggaggaaacucccuucaaggacaucguccgggugggagac

SEQ ID NO: 8877 - RNA, 48 nt, Artificial Sequence
  Description of Artificial Sequence:  Enzymatic Nucleic Acid
caagggggggaggaaacucccuucaaggacaucguccgggcugggaga

SEQ ID NO: 8878 - RNA, 48 nt, Artificial Sequence
  Description of Artificial Sequence:  Enzymatic Nucleic Acid
gcggggggggaggaaacucccuucaaggacaucguccgggaagggggc

SEQ ID NO: 8879 - RNA, 48 nt, Artificial Sequence
  Description of Artificial Sequence:  Enzymatic Nucleic Acid
ggcaggggggaggaaacucccuucaaggacaucguccgggggggggca

SEQ ID NO: 8880 - RNA, 48 nt, Artificial Sequence
  Description of Artificial Sequence:  Enzymatic Nucleic Acid
gagguaggggaggaaacucccuucaaggacaucguccgggaggggcgg

SEQ ID NO: 8881 - RNA, 48 nt, Artificial Sequence
  Description of Artificial Sequence:  Enzymatic Nucleic Acid
ggcagggcggaggaaacucccuucaaggacaucguccgggaggggaga

SEQ ID NO: 8882 - RNA, 48 nt, Artificial Sequence
  Description of Artificial Sequence:  Enzymatic Nucleic Acid
gggcagggggaggaaacucccuucaaggacaucguccgggcaggggag

SEQ ID NO: 8883 - RNA, 48 nt, Artificial Sequence
  Description of Artificial Sequence:  Enzymatic Nucleic Acid
uggcugggggaggaaacucccuucaaggacaucguccgggagggccag

SEQ ID NO: 8884 - RNA, 48 nt, Artificial Sequence
  Description of Artificial Sequence:  Enzymatic Nucleic Acid
uccucuggggaggaaacucccuucaaggacaucguccgggugggcagg

SEQ ID NO: 8885 - RNA, 48 nt, Artificial Sequence
  Description of Artificial Sequence:  Enzymatic Nucleic Acid
cuccuccuggaggaaacucccuucaaggacaucguccggguggcuggg

SEQ ID NO: 8886 - RNA, 48 nt, Artificial Sequence
  Description of Artificial Sequence:  Enzymatic Nucleic Acid
ggcuccucggaggaaacucccuucaaggacaucguccgggucuggcug

SEQ ID NO: 8887 - RNA, 48 nt, Artificial Sequence
  Description of Artificial Sequence:  Enzymatic Nucleic Acid
gggcuccuggaggaaacucccuucaaggacaucguccgggcucuggcu

SEQ ID NO: 8888 - RNA, 48 nt, Artificial Sequence
  Description of Artificial Sequence:  Enzymatic Nucleic Acid
gggggcucggaggaaacucccuucaaggacaucguccggguccucugg

SEQ ID NO: 8889 - RNA, 48 nt, Artificial Sequence
  Description of Artificial Sequence:  Enzymatic Nucleic Acid
ggggggcuggaggaaacucccuucaaggacaucguccgggcuccucug

SEQ ID NO: 8890 - RNA, 48 nt, Artificial Sequence
  Description of Artificial Sequence:  Enzymatic Nucleic Acid
cgggggggggaggaaacucccuucaaggacaucguccggguccuccuc

SEQ ID NO: 8891 - RNA, 48 nt, Artificial Sequence
  Description of Artificial Sequence:  Enzymatic Nucleic Acid
uggcuccuggaggaaacucccuucaaggacaucguccggggggggggc

SEQ ID NO: 8892 - RNA, 48 nt, Artificial Sequence
  Description of Artificial Sequence:  Enzymatic Nucleic Acid
gguggcucggaggaaacucccuucaaggacaucguccgggucgggggg

SEQ ID NO: 8893 - RNA, 48 nt, Artificial Sequence
  Description of Artificial Sequence:  Enzymatic Nucleic Acid
agguggcuggaggaaacucccuucaaggacaucguccgggcucggggg

SEQ ID NO: 8894 - RNA, 48 nt, Artificial Sequence
  Description of Artificial Sequence:  Enzymatic Nucleic Acid
ucagguggggaggaaacucccuucaaggacaucguccggguccucggg

SEQ ID NO: 8895 - RNA, 48 nt, Artificial Sequence
  Description of Artificial Sequence:  Enzymatic Nucleic Acid
gcagaaguggaggaaacucccuucaaggacaucguccgggagguggcu

SEQ ID NO: 8896 - RNA, 48 nt, Artificial Sequence
  Description of Artificial Sequence:  Enzymatic Nucleic Acid
ugggacagggaggaaacucccuucaaggacaucguccgggagaaguca

SEQ ID NO: 8897 - RNA, 48 nt, Artificial Sequence
  Description of Artificial Sequence:  Enzymatic Nucleic Acid
acuugggaggaggaaacucccuucaaggacaucguccgggagcagaag

SEQ ID NO: 8898 - RNA, 48 nt, Artificial Sequence
  Description of Artificial Sequence:  Enzymatic Nucleic Acid
uacuggcaggaggaaacucccuucaaggacaucguccggguugggaca

SEQ ID NO: 8899 - RNA, 48 nt, Artificial Sequence
  Description of Artificial Sequence:  Enzymatic Nucleic Acid
gauacuggggaggaaacucccuucaaggacaucguccgggacuuggga

SEQ ID NO: 8900 - RNA, 48 nt, Artificial Sequence
  Description of Artificial Sequence:  Enzymatic Nucleic Acid
gccugauaggaggaaacucccuucaaggacaucguccggguggcacuu

SEQ ID NO: 8901 - RNA, 48 nt, Artificial Sequence
  Description of Artificial Sequence:  Enzymatic Nucleic Acid
ucaggggcggaggaaacucccuucaaggacaucguccgggugauacug

SEQ ID NO: 8902 - RNA, 48 nt, Artificial Sequence
  Description of Artificial Sequence:  Enzymatic Nucleic Acid
aucaggggggaggaaacucccuucaaggacaucguccgggcugauacu

SEQ ID NO: 8903 - RNA, 48 nt, Artificial Sequence
  Description of Artificial Sequence:  Enzymatic Nucleic Acid
guccauauggaggaaacucccuucaaggacaucguccgggaggggccu

SEQ ID NO: 8904 - RNA, 48 nt, Artificial Sequence
  Description of Artificial Sequence:  Enzymatic Nucleic Acid
agggugucggaggaaacucccuucaaggacaucguccgggauaucagg

SEQ ID NO: 8905 - RNA, 48 nt, Artificial Sequence
  Description of Artificial Sequence:  Enzymatic Nucleic Acid
caggguguggaggaaacucccuucaaggacaucguccgggcauaucag

SEQ ID NO: 8906 - RNA, 48 nt, Artificial Sequence
  Description of Artificial Sequence:  Enzymatic Nucleic Acid
uguaucugggaggaaacucccuucaaggacaucguccgggaggguguc

SEQ ID NO: 8907 - RNA, 48 nt, Artificial Sequence
  Description of Artificial Sequence:  Enzymatic Nucleic Acid
acauguauggaggaaacucccuucaaggacaucguccgggugcagggu

SEQ ID NO: 8908 - RNA, 48 nt, Artificial Sequence
  Description of Artificial Sequence:  Enzymatic Nucleic Acid
cuccaugaggaggaaacucccuucaaggacaucguccgggauguaucu

SEQ ID NO: 8909 - RNA, 48 nt, Artificial Sequence
  Description of Artificial Sequence:  Enzymatic Nucleic Acid
augcacucggaggaaacucccuucaaggacaucguccgggaugacaug

SEQ ID NO: 8910 - RNA, 48 nt, Artificial Sequence
  Description of Artificial Sequence:  Enzymatic Nucleic Acid
aaugcacuggaggaaacucccuucaaggacaucguccgggcaugacau

SEQ ID NO: 8911 - RNA, 48 nt, Artificial Sequence
  Description of Artificial Sequence:  Enzymatic Nucleic Acid
ucaaugcaggaggaaacucccuucaaggacaucguccggguccaugac

SEQ ID NO: 8912 - RNA, 48 nt, Artificial Sequence
  Description of Artificial Sequence:  Enzymatic Nucleic Acid
acucaaugggaggaaacucccuucaaggacaucguccgggacuccaug

SEQ ID NO: 8913 - RNA, 48 nt, Artificial Sequence
  Description of Artificial Sequence:  Enzymatic Nucleic Acid
gcccuacuggaggaaacucccuucaaggacaucguccgggaaugcacu

SEQ ID NO: 8914 - RNA, 48 nt, Artificial Sequence
  Description of Artificial Sequence:  Enzymatic Nucleic Acid
cggcccuaggaggaaacucccuucaaggacaucguccgggucaaugca

SEQ ID NO: 8915 - RNA, 48 nt, Artificial Sequence
  Description of Artificial Sequence:  Enzymatic Nucleic Acid
ggccggccggaggaaacucccuucaaggacaucguccggguacucaau

SEQ ID NO: 8916 - RNA, 48 nt, Artificial Sequence
  Description of Artificial Sequence:  Enzymatic Nucleic Acid
uggccggcggaggaaacucccuucaaggacaucguccgggcuacucaa

SEQ ID NO: 8917 - RNA, 48 nt, Artificial Sequence
  Description of Artificial Sequence:  Enzymatic Nucleic Acid
cuggccggggaggaaacucccuucaaggacaucguccgggccuacuca

SEQ ID NO: 8918 - RNA, 48 nt, Artificial Sequence
  Description of Artificial Sequence:  Enzymatic Nucleic Acid
gcacuggcggaggaaacucccuucaaggacaucguccgggggcccuac

SEQ ID NO: 8919 - RNA, 48 nt, Artificial Sequence
  Description of Artificial Sequence:  Enzymatic Nucleic Acid
ugcacuggggaggaaacucccuucaaggacaucguccgggcggcccua

SEQ ID NO: 8920 - RNA, 48 nt, Artificial Sequence
  Description of Artificial Sequence:  Enzymatic Nucleic Acid
gccuugcaggaggaaacucccuucaaggacaucguccggguggccggc

SEQ ID NO: 8921 - RNA, 48 nt, Artificial Sequence
  Description of Artificial Sequence:  Enzymatic Nucleic Acid
uggccuugggaggaaacucccuucaaggacaucguccgggacuggccg

SEQ ID NO: 8922 - RNA, 48 nt, Artificial Sequence
  Description of Artificial Sequence:  Enzymatic Nucleic Acid
gcaguggcggaggaaacucccuucaaggacaucguccggguugcacug

SEQ ID NO: 8923 - RNA, 48 nt, Artificial Sequence
  Description of Artificial Sequence:  Enzymatic Nucleic Acid
ggcaguggggaggaaacucccuucaaggacaucguccgggcuugcacu

SEQ ID NO: 8924 - RNA, 48 nt, Artificial Sequence
  Description of Artificial Sequence:  Enzymatic Nucleic Acid
cgggcaggggaggaaacucccuucaaggacaucguccgggaguggccu

SEQ ID NO: 8925 - RNA, 48 nt, Artificial Sequence
  Description of Artificial Sequence:  Enzymatic Nucleic Acid
uccucgggggaggaaacucccuucaaggacaucguccgggaggcagug

SEQ ID NO: 8926 - RNA, 48 nt, Artificial Sequence
  Description of Artificial Sequence:  Enzymatic Nucleic Acid
cacguccuggaggaaacucccuucaaggacaucguccggggggcaggc

SEQ ID NO: 8927 - RNA, 48 nt, Artificial Sequence
  Description of Artificial Sequence:  Enzymatic Nucleic Acid
ggcacgucggaggaaacucccuucaaggacaucguccgggucgggcag

SEQ ID NO: 8928 - RNA, 48 nt, Artificial Sequence
  Description of Artificial Sequence:  Enzymatic Nucleic Acid
gggcacguggaggaaacucccuucaaggacaucguccgggcucgggca

SEQ ID NO: 8929 - RNA, 48 nt, Artificial Sequence
  Description of Artificial Sequence:  Enzymatic Nucleic Acid
cccgggcaggaggaaacucccuucaaggacaucguccgggguccucgg

SEQ ID NO: 8930 - RNA, 48 nt, Artificial Sequence
  Description of Artificial Sequence:  Enzymatic Nucleic Acid
gucccgggggaggaaacucccuucaaggacaucguccgggacguccuc

SEQ ID NO: 8931 - RNA, 48 nt, Artificial Sequence
  Description of Artificial Sequence:  Enzymatic Nucleic Acid
cacgguccggaggaaacucccuucaaggacaucguccggggggcacgu

SEQ ID NO: 8932 - RNA, 48 nt, Artificial Sequence
  Description of Artificial Sequence:  Enzymatic Nucleic Acid
gcacggucggaggaaacucccuucaaggacaucguccgggcgggcacg

SEQ ID NO: 8933 - RNA, 48 nt, Artificial Sequence
  Description of Artificial Sequence:  Enzymatic Nucleic Acid
ugcacgguggaggaaacucccuucaaggacaucguccgggccgggcac

SEQ ID NO: 8934 - RNA, 48 nt, Artificial Sequence
  Description of Artificial Sequence:  Enzymatic Nucleic Acid
agacugcaggaggaaacucccuucaaggacaucguccgggggucccgg

SEQ ID NO: 8935 - RNA, 48 nt, Artificial Sequence
  Description of Artificial Sequence:  Enzymatic Nucleic Acid
gcagacugggaggaaacucccuucaaggacaucguccgggacgguccc

SEQ ID NO: 8936 - RNA, 48 nt, Artificial Sequence
  Description of Artificial Sequence:  Enzymatic Nucleic Acid
agcgcagaggaggaaacucccuucaaggacaucguccgggugcacggu

SEQ ID NO: 8937 - RNA, 48 nt, Artificial Sequence
  Description of Artificial Sequence:  Enzymatic Nucleic Acid
ggaaagcgggaggaaacucccuucaaggacaucguccgggagacugca

SEQ ID NO: 8938 - RNA, 48 nt, Artificial Sequence
  Description of Artificial Sequence:  Enzymatic Nucleic Acid
gaggaaagggaggaaacucccuucaaggacaucguccggggcagacug

SEQ ID NO: 8939 - RNA, 48 nt, Artificial Sequence
  Description of Artificial Sequence:  Enzymatic Nucleic Acid
uaggcaggggaggaaacucccuucaaggacaucguccggggggagagg

SEQ ID NO: 8940 - RNA, 48 nt, Artificial Sequence
  Description of Artificial Sequence:  Enzymatic Nucleic Acid
gggcuaggggaggaaacucccuucaaggacaucguccgggaggcggga

SEQ ID NO: 8941 - RNA, 48 nt, Artificial Sequence
  Description of Artificial Sequence:  Enzymatic Nucleic Acid
auccugggggaggaaacucccuucaaggacaucguccggguaggcagg

SEQ ID NO: 8942 - RNA, 48 nt, Artificial Sequence
  Description of Artificial Sequence:  Enzymatic Nucleic Acid
ccuucaucggaggaaacucccuucaaggacaucguccgggugggcuag

SEQ ID NO: 8943 - RNA, 48 nt, Artificial Sequence
  Description of Artificial Sequence:  Enzymatic Nucleic Acid
cccuucauggaggaaacucccuucaaggacaucguccgggcugggcua

SEQ ID NO: 8944 - RNA, 48 nt, Artificial Sequence
  Description of Artificial Sequence:  Enzymatic Nucleic Acid
cagcccuuggaggaaacucccuucaaggacaucguccgggauccuggg

SEQ ID NO: 8945 - RNA, 48 nt, Artificial Sequence
  Description of Artificial Sequence:  Enzymatic Nucleic Acid
acccagccggaggaaacucccuucaaggacaucguccggguucauccu

SEQ ID NO: 8946 - RNA, 48 nt, Artificial Sequence
  Description of Artificial Sequence:  Enzymatic Nucleic Acid
cacccagcggaggaaacucccuucaaggacaucguccgggcuucaucc

SEQ ID NO: 8947 - RNA, 48 nt, Artificial Sequence
  Description of Artificial Sequence:  Enzymatic Nucleic Acid
ccacccagggaggaaacucccuucaaggacaucguccgggccuucauc

SEQ ID NO: 8948 - RNA, 48 nt, Artificial Sequence
  Description of Artificial Sequence:  Enzymatic Nucleic Acid
uggccaccggaggaaacucccuucaaggacaucguccgggagcccuuc

SEQ ID NO: 8949 - RNA, 48 nt, Artificial Sequence
  Description of Artificial Sequence:  Enzymatic Nucleic Acid
guggccacggaggaaacucccuucaaggacaucguccgggcagcccuu

SEQ ID NO: 8950 - RNA, 48 nt, Artificial Sequence
  Description of Artificial Sequence:  Enzymatic Nucleic Acid
uguggccaggaggaaacucccuucaaggacaucguccgggccagcccu

SEQ ID NO: 8951 - RNA, 48 nt, Artificial Sequence
  Description of Artificial Sequence:  Enzymatic Nucleic Acid
guuguggcggaggaaacucccuucaaggacaucguccgggacccagcc

SEQ ID NO: 8952 - RNA, 48 nt, Artificial Sequence
  Description of Artificial Sequence:  Enzymatic Nucleic Acid
aguuguggggaggaaacucccuucaaggacaucguccgggcacccagc

SEQ ID NO: 8953 - RNA, 48 nt, Artificial Sequence
  Description of Artificial Sequence:  Enzymatic Nucleic Acid
uggcauccggaggaaacucccuucaaggacaucguccgggaguugugg

SEQ ID NO: 8954 - RNA, 48 nt, Artificial Sequence
  Description of Artificial Sequence:  Enzymatic Nucleic Acid
guggcaucggaggaaacucccuucaaggacaucguccgggcaguugug

SEQ ID NO: 8955 - RNA, 48 nt, Artificial Sequence
  Description of Artificial Sequence:  Enzymatic Nucleic Acid
gguggcauggaggaaacucccuucaaggacaucguccgggccaguugu

SEQ ID NO: 8956 - RNA, 48 nt, Artificial Sequence
  Description of Artificial Sequence:  Enzymatic Nucleic Acid
ccagguggggaggaaacucccuucaaggacaucguccgggaucccagu

SEQ ID NO: 8957 - RNA, 48 nt, Artificial Sequence
  Description of Artificial Sequence:  Enzymatic Nucleic Acid
uggggcucggaggaaacucccuucaaggacaucguccgggagguggca

SEQ ID NO: 8958 - RNA, 48 nt, Artificial Sequence
  Description of Artificial Sequence:  Enzymatic Nucleic Acid
guggggcuggaggaaacucccuucaaggacaucguccgggcagguggc

SEQ ID NO: 8959 - RNA, 48 nt, Artificial Sequence
  Description of Artificial Sequence:  Enzymatic Nucleic Acid
ggguggggggaggaaacucccuucaaggacaucguccggguccaggug

SEQ ID NO: 8960 - RNA, 48 nt, Artificial Sequence
  Description of Artificial Sequence:  Enzymatic Nucleic Acid
gccagcucggaggaaacucccuucaaggacaucguccggguggguggg

SEQ ID NO: 8961 - RNA, 48 nt, Artificial Sequence
  Description of Artificial Sequence:  Enzymatic Nucleic Acid
ggccagcuggaggaaacucccuucaaggacaucguccgggcugggugg

SEQ ID NO: 8962 - RNA, 48 nt, Artificial Sequence
  Description of Artificial Sequence:  Enzymatic Nucleic Acid
gcggccagggaggaaacucccuucaaggacaucguccggguccugggu

SEQ ID NO: 8963 - RNA, 48 nt, Artificial Sequence
  Description of Artificial Sequence:  Enzymatic Nucleic Acid
gccgcggcggaggaaacucccuucaaggacaucguccgggagcuccug

SEQ ID NO: 8964 - RNA, 48 nt, Artificial Sequence
  Description of Artificial Sequence:  Enzymatic Nucleic Acid
ugccgcggggaggaaacucccuucaaggacaucguccgggcagcuccu

SEQ ID NO: 8965 - RNA, 48 nt, Artificial Sequence
  Description of Artificial Sequence:  Enzymatic Nucleic Acid
aggugccgggaggaaacucccuucaaggacaucguccgggggccagcu

SEQ ID NO: 8966 - RNA, 48 nt, Artificial Sequence
  Description of Artificial Sequence:  Enzymatic Nucleic Acid
uaaggugcggaggaaacucccuucaaggacaucguccggggcggccag

SEQ ID NO: 8967 - RNA, 48 nt, Artificial Sequence
  Description of Artificial Sequence:  Enzymatic Nucleic Acid
guaaggugggaggaaacucccuucaaggacaucguccgggcgcggcca

SEQ ID NO: 8968 - RNA, 48 nt, Artificial Sequence
  Description of Artificial Sequence:  Enzymatic Nucleic Acid
agcugaagggaggaaacucccuucaaggacaucguccgggguaaggug

SEQ ID NO: 8969 - RNA, 48 nt, Artificial Sequence
  Description of Artificial Sequence:  Enzymatic Nucleic Acid
aucaacagggaggaaacucccuucaaggacaucguccgggugaagcgu

SEQ ID NO: 8970 - RNA, 48 nt, Artificial Sequence
  Description of Artificial Sequence:  Enzymatic Nucleic Acid
cggaucaaggaggaaacucccuucaaggacaucguccgggagcugaag

SEQ ID NO: 8971 - RNA, 48 nt, Artificial Sequence
  Description of Artificial Sequence:  Enzymatic Nucleic Acid
cagcggauggaggaaacucccuucaaggacaucguccgggaacagcug

SEQ ID NO: 8972 - RNA, 48 nt, Artificial Sequence
  Description of Artificial Sequence:  Enzymatic Nucleic Acid
gggaccagggaggaaacucccuucaaggacaucguccgggggaucaac

SEQ ID NO: 8973 - RNA, 48 nt, Artificial Sequence
  Description of Artificial Sequence:  Enzymatic Nucleic Acid
gaggggacggaggaaacucccuucaaggacaucguccgggagcggauc

SEQ ID NO: 8974 - RNA, 48 nt, Artificial Sequence
  Description of Artificial Sequence:  Enzymatic Nucleic Acid
agaggggaggaggaaacucccuucaaggacaucguccgggcagcggau

SEQ ID NO: 8975 - RNA, 48 nt, Artificial Sequence
  Description of Artificial Sequence:  Enzymatic Nucleic Acid
aucuacccggaggaaacucccuucaaggacaucguccgggaaaagagg

SEQ ID NO: 8976 - RNA, 48 nt, Artificial Sequence
  Description of Artificial Sequence:  Enzymatic Nucleic Acid
caucuaccggaggaaacucccuucaaggacaucguccgggcaaaagag

SEQ ID NO: 8977 - RNA, 48 nt, Artificial Sequence
  Description of Artificial Sequence:  Enzymatic Nucleic Acid
gcaucuacggaggaaacucccuucaaggacaucguccgggccaaaaga

SEQ ID NO: 8978 - RNA, 48 nt, Artificial Sequence
  Description of Artificial Sequence:  Enzymatic Nucleic Acid
cgcaucuaggaggaaacucccuucaaggacaucguccgggcccaaaag

SEQ ID NO: 8979 - RNA, 48 nt, Artificial Sequence
  Description of Artificial Sequence:  Enzymatic Nucleic Acid
ggccgcauggaggaaacucccuucaaggacaucguccggguaccccaa

SEQ ID NO: 8980 - RNA, 48 nt, Artificial Sequence
  Description of Artificial Sequence:  Enzymatic Nucleic Acid
cggggccgggaggaaacucccuucaaggacaucguccgggaucuaccc

SEQ ID NO: 8981 - RNA, 48 nt, Artificial Sequence
  Description of Artificial Sequence:  Enzymatic Nucleic Acid
aucggggcggaggaaacucccuucaaggacaucguccggggcaucuac

SEQ ID NO: 8982 - RNA, 48 nt, Artificial Sequence
  Description of Artificial Sequence:  Enzymatic Nucleic Acid
gaucggggggaggaaacucccuucaaggacaucguccgggcgcaucua

SEQ ID NO: 8983 - RNA, 48 nt, Artificial Sequence
  Description of Artificial Sequence:  Enzymatic Nucleic Acid
ggccugauggaggaaacucccuucaaggacaucguccgggggggccgc

SEQ ID NO: 8984 - RNA, 48 nt, Artificial Sequence
  Description of Artificial Sequence:  Enzymatic Nucleic Acid
agucaggcggaggaaacucccuucaaggacaucguccgggugaucggg

SEQ ID NO: 8985 - RNA, 48 nt, Artificial Sequence
  Description of Artificial Sequence:  Enzymatic Nucleic Acid
gagucaggggaggaaacucccuucaaggacaucguccgggcugaucgg

SEQ ID NO: 8986 - RNA, 48 nt, Artificial Sequence
  Description of Artificial Sequence:  Enzymatic Nucleic Acid
cagcgaguggaggaaacucccuucaaggacaucguccgggaggccuga

SEQ ID NO: 8987 - RNA, 48 nt, Artificial Sequence
  Description of Artificial Sequence:  Enzymatic Nucleic Acid
aagagcagggaggaaacucccuucaaggacaucguccggggagucagg

SEQ ID NO: 8988 - RNA, 48 nt, Artificial Sequence
  Description of Artificial Sequence:  Enzymatic Nucleic Acid
aaaaagagggaggaaacucccuucaaggacaucguccgggagcgaguc

SEQ ID NO: 8989 - RNA, 48 nt, Artificial Sequence
  Description of Artificial Sequence:  Enzymatic Nucleic Acid
gaagggaaggaggaaacucccuucaaggacaucguccgggaaaaagag

SEQ ID NO: 8990 - RNA, 48 nt, Artificial Sequence
  Description of Artificial Sequence:  Enzymatic Nucleic Acid
cgagcagaggaggaaacucccuucaaggacaucguccgggagaaggga

SEQ ID NO: 8991 - RNA, 48 nt, Artificial Sequence
  Description of Artificial Sequence:  Enzymatic Nucleic Acid
gguucgagggaggaaacucccuucaaggacaucguccgggagacagaa

SEQ ID NO: 8992 - RNA, 48 nt, Artificial Sequence
  Description of Artificial Sequence:  Enzymatic Nucleic Acid
aagugguuggaggaaacucccuucaaggacaucguccggggagcagac

SEQ ID NO: 8993 - RNA, 48 nt, Artificial Sequence
  Description of Artificial Sequence:  Enzymatic Nucleic Acid
gcccgaggggaggaaacucccuucaaggacaucguccgggaagugguu

SEQ ID NO: 8994 - RNA, 48 nt, Artificial Sequence
  Description of Artificial Sequence:  Enzymatic Nucleic Acid
gauuagccggaggaaacucccuucaaggacaucguccggggaggcaag

SEQ ID NO: 8995 - RNA, 48 nt, Artificial Sequence
  Description of Artificial Sequence:  Enzymatic Nucleic Acid
ggauuagcggaggaaacucccuucaaggacaucguccgggcgaggcaa

SEQ ID NO: 8996 - RNA, 48 nt, Artificial Sequence
  Description of Artificial Sequence:  Enzymatic Nucleic Acid
gggauuagggaggaaacucccuucaaggacaucguccgggccgaggca

SEQ ID NO: 8997 - RNA, 48 nt, Artificial Sequence
  Description of Artificial Sequence:  Enzymatic Nucleic Acid
cccagugcggaggaaacucccuucaaggacaucguccgggggguggag

SEQ ID NO: 8998 - RNA, 48 nt, Artificial Sequence
  Description of Artificial Sequence:  Enzymatic Nucleic Acid
ccccagugggaggaaacucccuucaaggacaucguccgggcgggugga

SEQ ID NO: 8999 - RNA, 48 nt, Artificial Sequence
  Description of Artificial Sequence:  Enzymatic Nucleic Acid
gacuucccggaggaaacucccuucaaggacaucguccgggagugccgg

SEQ ID NO: 9000 - RNA, 48 nt, Artificial Sequence
  Description of Artificial Sequence:  Enzymatic Nucleic Acid
ugacuuccggaggaaacucccuucaaggacaucguccgggcagugccg

SEQ ID NO: 9001 - RNA, 48 nt, Artificial Sequence
  Description of Artificial Sequence:  Enzymatic Nucleic Acid
uugacuucggaggaaacucccuucaaggacaucguccgggccagugcc

SEQ ID NO: 9002 - RNA, 48 nt, Artificial Sequence
  Description of Artificial Sequence:  Enzymatic Nucleic Acid
cuugacuuggaggaaacucccuucaaggacaucguccgggcccagugc

SEQ ID NO: 9003 - RNA, 48 nt, Artificial Sequence
  Description of Artificial Sequence:  Enzymatic Nucleic Acid
auucuugaggaggaaacucccuucaaggacaucguccggguuccccag

SEQ ID NO: 9004 - RNA, 48 nt, Artificial Sequence
  Description of Artificial Sequence:  Enzymatic Nucleic Acid
gccccauuggaggaaacucccuucaaggacaucguccggguugacuuc

SEQ ID NO: 9005 - RNA, 48 nt, Artificial Sequence
  Description of Artificial Sequence:  Enzymatic Nucleic Acid
ccaggcccggaggaaacucccuucaaggacaucguccgggauucuuga

SEQ ID NO: 9006 - RNA, 48 nt, Artificial Sequence
  Description of Artificial Sequence:  Enzymatic Nucleic Acid
cccaggccggaggaaacucccuucaaggacaucguccgggcauucuug

SEQ ID NO: 9007 - RNA, 48 nt, Artificial Sequence
  Description of Artificial Sequence:  Enzymatic Nucleic Acid
ccccaggcggaggaaacucccuucaaggacaucguccgggccauucuu

SEQ ID NO: 9008 - RNA, 48 nt, Artificial Sequence
  Description of Artificial Sequence:  Enzymatic Nucleic Acid
gccccaggggaggaaacucccuucaaggacaucguccgggcccauucu

SEQ ID NO: 9009 - RNA, 48 nt, Artificial Sequence
  Description of Artificial Sequence:  Enzymatic Nucleic Acid
gagagcccggaggaaacucccuucaaggacaucguccgggaggcccca

SEQ ID NO: 9010 - RNA, 48 nt, Artificial Sequence
  Description of Artificial Sequence:  Enzymatic Nucleic Acid
ugagagccggaggaaacucccuucaaggacaucguccgggcaggcccc

SEQ ID NO: 9011 - RNA, 48 nt, Artificial Sequence
  Description of Artificial Sequence:  Enzymatic Nucleic Acid
cugagagcggaggaaacucccuucaaggacaucguccgggccaggccc

SEQ ID NO: 9012 - RNA, 48 nt, Artificial Sequence
  Description of Artificial Sequence:  Enzymatic Nucleic Acid
ccugagagggaggaaacucccuucaaggacaucguccgggcccaggcc

SEQ ID NO: 9013 - RNA, 48 nt, Artificial Sequence
  Description of Artificial Sequence:  Enzymatic Nucleic Acid
aguucuccggaggaaacucccuucaaggacaucguccgggugagagcc

SEQ ID NO: 9014 - RNA, 48 nt, Artificial Sequence
  Description of Artificial Sequence:  Enzymatic Nucleic Acid
caguucucggaggaaacucccuucaaggacaucguccgggcugagagc

SEQ ID NO: 9015 - RNA, 48 nt, Artificial Sequence
  Description of Artificial Sequence:  Enzymatic Nucleic Acid
gcaguucuggaggaaacucccuucaaggacaucguccgggccugagag

SEQ ID NO: 9016 - RNA, 48 nt, Artificial Sequence
  Description of Artificial Sequence:  Enzymatic Nucleic Acid
aagcaguuggaggaaacucccuucaaggacaucguccgggucccugag

SEQ ID NO: 9017 - RNA, 48 nt, Artificial Sequence
  Description of Artificial Sequence:  Enzymatic Nucleic Acid
aggggaagggaggaaacucccuucaaggacaucguccgggaguucucc

SEQ ID NO: 9018 - RNA, 48 nt, Artificial Sequence
  Description of Artificial Sequence:  Enzymatic Nucleic Acid
agcucugcggaggaaacucccuucaaggacaucguccgggaggggaag

SEQ ID NO: 9019 - RNA, 48 nt, Artificial Sequence
  Description of Artificial Sequence:  Enzymatic Nucleic Acid
cagcucugggaggaaacucccuucaaggacaucguccgggcaggggaa

SEQ ID NO: 9020 - RNA, 48 nt, Artificial Sequence
  Description of Artificial Sequence:  Enzymatic Nucleic Acid
acccagcuggaggaaacucccuucaaggacaucguccgggugccaggg

SEQ ID NO: 9021 - RNA, 48 nt, Artificial Sequence
  Description of Artificial Sequence:  Enzymatic Nucleic Acid
ccacccagggaggaaacucccuucaaggacaucguccgggucugccag

SEQ ID NO: 9022 - RNA, 48 nt, Artificial Sequence
  Description of Artificial Sequence:  Enzymatic Nucleic Acid
cugccaccggaggaaacucccuucaaggacaucguccgggagcucugc

SEQ ID NO: 9023 - RNA, 48 nt, Artificial Sequence
  Description of Artificial Sequence:  Enzymatic Nucleic Acid
gcugccacggaggaaacucccuucaaggacaucguccgggcagcucug

SEQ ID NO: 9024 - RNA, 48 nt, Artificial Sequence
  Description of Artificial Sequence:  Enzymatic Nucleic Acid
agcugccaggaggaaacucccuucaaggacaucguccgggccagcucu

SEQ ID NO: 9025 - RNA, 48 nt, Artificial Sequence
  Description of Artificial Sequence:  Enzymatic Nucleic Acid
agagcugcggaggaaacucccuucaaggacaucguccgggacccagcu

SEQ ID NO: 9026 - RNA, 48 nt, Artificial Sequence
  Description of Artificial Sequence:  Enzymatic Nucleic Acid
aagagcugggaggaaacucccuucaaggacaucguccgggcacccagc

SEQ ID NO: 9027 - RNA, 48 nt, Artificial Sequence
  Description of Artificial Sequence:  Enzymatic Nucleic Acid
aggaagagggaggaaacucccuucaaggacaucguccgggugccaccc

SEQ ID NO: 9028 - RNA, 48 nt, Artificial Sequence
  Description of Artificial Sequence:  Enzymatic Nucleic Acid
ucggugucggaggaaacucccuucaaggacaucguccgggggugggag

SEQ ID NO: 9029 - RNA, 48 nt, Artificial Sequence
  Description of Artificial Sequence:  Enzymatic Nucleic Acid
gucgguguggaggaaacucccuucaaggacaucguccgggcgguggga

SEQ ID NO: 9030 - RNA, 48 nt, Artificial Sequence
  Description of Artificial Sequence:  Enzymatic Nucleic Acid
gggcggguggaggaaacucccuucaaggacaucguccggggguguccg

SEQ ID NO: 9031 - RNA, 48 nt, Artificial Sequence
  Description of Artificial Sequence:  Enzymatic Nucleic Acid
gcggcgggggaggaaacucccuucaaggacaucguccggggggucggu

SEQ ID NO: 9032 - RNA, 48 nt, Artificial Sequence
  Description of Artificial Sequence:  Enzymatic Nucleic Acid
cacagcggggaggaaacucccuucaaggacaucguccggggggcgggu

SEQ ID NO: 9033 - RNA, 48 nt, Artificial Sequence
  Description of Artificial Sequence:  Enzymatic Nucleic Acid
gggcacagggaggaaacucccuucaaggacaucguccgggggcgggcg

SEQ ID NO: 9034 - RNA, 48 nt, Artificial Sequence
  Description of Artificial Sequence:  Enzymatic Nucleic Acid
ccagggcaggaggaaacucccuucaaggacaucguccgggagcggcgg

SEQ ID NO: 9035 - RNA, 48 nt, Artificial Sequence
  Description of Artificial Sequence:  Enzymatic Nucleic Acid
ucccagggggaggaaacucccuucaaggacaucguccgggacagcggc

SEQ ID NO: 9036 - RNA, 48 nt, Artificial Sequence
  Description of Artificial Sequence:  Enzymatic Nucleic Acid
agcacuccggaggaaacucccuucaaggacaucguccgggagggcaca

SEQ ID NO: 9037 - RNA, 48 nt, Artificial Sequence
  Description of Artificial Sequence:  Enzymatic Nucleic Acid
cagcacucggaggaaacucccuucaaggacaucguccgggcagggcac

SEQ ID NO: 9038 - RNA, 48 nt, Artificial Sequence
  Description of Artificial Sequence:  Enzymatic Nucleic Acid
gcagcacuggaggaaacucccuucaaggacaucguccgggccagggca

SEQ ID NO: 9039 - RNA, 48 nt, Artificial Sequence
  Description of Artificial Sequence:  Enzymatic Nucleic Acid
gggcagcaggaggaaacucccuucaaggacaucguccgggucccaggg

SEQ ID NO: 9040 - RNA, 48 nt, Artificial Sequence
  Description of Artificial Sequence:  Enzymatic Nucleic Acid
gagggcagggaggaaacucccuucaaggacaucguccgggacucccag

SEQ ID NO: 9041 - RNA, 48 nt, Artificial Sequence
  Description of Artificial Sequence:  Enzymatic Nucleic Acid
uaagagggggaggaaacucccuucaaggacaucguccgggagcacucc

SEQ ID NO: 9042 - RNA, 48 nt, Artificial Sequence
  Description of Artificial Sequence:  Enzymatic Nucleic Acid
cccgugugggaggaaacucccuucaaggacaucguccgggaugguaag

SEQ ID NO: 9043 - RNA, 48 nt, Artificial Sequence
  Description of Artificial Sequence:  Enzymatic Nucleic Acid
agagcaccggaggaaacucccuucaaggacaucguccggggugugcau

SEQ ID NO: 9044 - RNA, 48 nt, Artificial Sequence
  Description of Artificial Sequence:  Enzymatic Nucleic Acid
gagagcacggaggaaacucccuucaaggacaucguccgggcgugugca

SEQ ID NO: 9045 - RNA, 48 nt, Artificial Sequence
  Description of Artificial Sequence:  Enzymatic Nucleic Acid
ggagagcaggaggaaacucccuucaaggacaucguccgggccgugugc

SEQ ID NO: 9046 - RNA, 48 nt, Artificial Sequence
  Description of Artificial Sequence:  Enzymatic Nucleic Acid
aaggagagggaggaaacucccuucaaggacaucguccgggacccgugu

SEQ ID NO: 9047 - RNA, 48 nt, Artificial Sequence
  Description of Artificial Sequence:  Enzymatic Nucleic Acid
augcagccggaggaaacucccuucaaggacaucguccgggaaaaggag

SEQ ID NO: 9048 - RNA, 48 nt, Artificial Sequence
  Description of Artificial Sequence:  Enzymatic Nucleic Acid
caugcagcggaggaaacucccuucaaggacaucguccgggcaaaagga

SEQ ID NO: 9049 - RNA, 48 nt, Artificial Sequence
  Description of Artificial Sequence:  Enzymatic Nucleic Acid
gcaugcagggaggaaacucccuucaaggacaucguccgggccaaaagg

SEQ ID NO: 9050 - RNA, 48 nt, Artificial Sequence
  Description of Artificial Sequence:  Enzymatic Nucleic Acid
auagcaugggaggaaacucccuucaaggacaucguccgggagcccaaa

SEQ ID NO: 9051 - RNA, 48 nt, Artificial Sequence
  Description of Artificial Sequence:  Enzymatic Nucleic Acid
uggaauagggaggaaacucccuucaaggacaucguccgggaugcagcc

SEQ ID NO: 9052 - RNA, 48 nt, Artificial Sequence
  Description of Artificial Sequence:  Enzymatic Nucleic Acid
ucuggcugggaggaaacucccuucaaggacaucguccgggaaaaugga

SEQ ID NO: 9053 - RNA, 48 nt, Artificial Sequence
  Description of Artificial Sequence:  Enzymatic Nucleic Acid
cggucuggggaggaaacucccuucaaggacaucguccgggugcaaaau

SEQ ID NO: 9054 - RNA, 48 nt, Artificial Sequence
  Description of Artificial Sequence:  Enzymatic Nucleic Acid
acaucgguggaggaaacucccuucaaggacaucguccggguggcugca

SEQ ID NO: 9055 - RNA, 48 nt, Artificial Sequence
  Description of Artificial Sequence:  Enzymatic Nucleic Acid
auacacauggaggaaacucccuucaaggacaucguccgggggucuggc

SEQ ID NO: 9056 - RNA, 48 nt, Artificial Sequence
  Description of Artificial Sequence:  Enzymatic Nucleic Acid
uaaauacaggaggaaacucccuucaaggacaucguccgggaucggucu

SEQ ID NO: 9057 - RNA, 48 nt, Artificial Sequence
  Description of Artificial Sequence:  Enzymatic Nucleic Acid
guuaaauaggaggaaacucccuucaaggacaucguccgggacaucggu

SEQ ID NO: 9058 - RNA, 48 nt, Artificial Sequence
  Description of Artificial Sequence:  Enzymatic Nucleic Acid
aauagugaggaggaaacucccuucaaggacaucguccgggugguuaaa

SEQ ID NO: 9059 - RNA, 48 nt, Artificial Sequence
  Description of Artificial Sequence:  Enzymatic Nucleic Acid
auguccauggaggaaacucccuucaaggacaucguccgggaauaguga

SEQ ID NO: 9060 - RNA, 48 nt, Artificial Sequence
  Description of Artificial Sequence:  Enzymatic Nucleic Acid
caaaugucggaggaaacucccuucaaggacaucguccgggaucaauag

SEQ ID NO: 9061 - RNA, 48 nt, Artificial Sequence
  Description of Artificial Sequence:  Enzymatic Nucleic Acid
ccaaauguggaggaaacucccuucaaggacaucguccgggcaucaaua

SEQ ID NO: 9062 - RNA, 48 nt, Artificial Sequence
  Description of Artificial Sequence:  Enzymatic Nucleic Acid
aaacaaccggaggaaacucccuucaaggacaucguccgggaaaugucc

SEQ ID NO: 9063 - RNA, 48 nt, Artificial Sequence
  Description of Artificial Sequence:  Enzymatic Nucleic Acid
gaaacaacggaggaaacucccuucaaggacaucguccgggcaaauguc

SEQ ID NO: 9064 - RNA, 48 nt, Artificial Sequence
  Description of Artificial Sequence:  Enzymatic Nucleic Acid
ggaaacaaggaggaaacucccuucaaggacaucguccgggccaaaugu

SEQ ID NO: 9065 - RNA, 48 nt, Artificial Sequence
  Description of Artificial Sequence:  Enzymatic Nucleic Acid
augggaaaggaggaaacucccuucaaggacaucguccgggaacccaaa

SEQ ID NO: 9066 - RNA, 48 nt, Artificial Sequence
  Description of Artificial Sequence:  Enzymatic Nucleic Acid
uaugguaaggaggaaacucccuucaaggacaucguccgggaaaaagau

SEQ ID NO: 9067 - RNA, 48 nt, Artificial Sequence
  Description of Artificial Sequence:  Enzymatic Nucleic Acid
uacuaugcggaggaaacucccuucaaggacaucguccgggauuauuua

SEQ ID NO: 9068 - RNA, 48 nt, Artificial Sequence
  Description of Artificial Sequence:  Enzymatic Nucleic Acid
uuacuaugggaggaaacucccuucaaggacaucguccgggcauuauuu

SEQ ID NO: 9069 - RNA, 48 nt, Artificial Sequence
  Description of Artificial Sequence:  Enzymatic Nucleic Acid
uuuuuuuaggaggaaacucccuucaaggacaucguccggguaugccau

SEQ ID NO: 9070 - RNA, 38 nt, Artificial Sequence
  Description of Artificial Sequence:  Enzymatic Nucleic Acid
uaugagcacugaugaggccguuaggccgaaacugcgcc

SEQ ID NO: 9071 - RNA, 38 nt, Artificial Sequence
  Description of Artificial Sequence:  Enzymatic Nucleic Acid
guaugagccugaugaggccguuaggccgaaaacugcgc

SEQ ID NO: 9072 - RNA, 38 nt, Artificial Sequence
  Description of Artificial Sequence:  Enzymatic Nucleic Acid
caaaguaucugaugaggccguuaggccgaaagcaaacu

SEQ ID NO: 9073 - RNA, 38 nt, Artificial Sequence
  Description of Artificial Sequence:  Enzymatic Nucleic Acid
ucacaaagcugaugaggccguuaggccgaaaugagcaa

SEQ ID NO: 9074 - RNA, 38 nt, Artificial Sequence
  Description of Artificial Sequence:  Enzymatic Nucleic Acid
aagucacacugaugaggccguuaggccgaaaguaugag

SEQ ID NO: 9075 - RNA, 38 nt, Artificial Sequence
  Description of Artificial Sequence:  Enzymatic Nucleic Acid
caagucaccugaugaggccguuaggccgaaaaguauga

SEQ ID NO: 9076 - RNA, 38 nt, Artificial Sequence
  Description of Artificial Sequence:  Enzymatic Nucleic Acid
gugaccgccugaugaggccguuaggccgaaagucacaa

SEQ ID NO: 9077 - RNA, 38 nt, Artificial Sequence
  Description of Artificial Sequence:  Enzymatic Nucleic Acid
gccacugucugaugaggccguuaggccgaaaccgcaag

SEQ ID NO: 9078 - RNA, 38 nt, Artificial Sequence
  Description of Artificial Sequence:  Enzymatic Nucleic Acid
uggagcugcugaugaggccguuaggccgaaaugccacu

SEQ ID NO: 9079 - RNA, 38 nt, Artificial Sequence
  Description of Artificial Sequence:  Enzymatic Nucleic Acid
guggagcucugaugaggccguuaggccgaaaaugccac

SEQ ID NO: 9080 - RNA, 38 nt, Artificial Sequence
  Description of Artificial Sequence:  Enzymatic Nucleic Acid
caagugugcugaugaggccguuaggccgaaagcugaau

SEQ ID NO: 9081 - RNA, 38 nt, Artificial Sequence
  Description of Artificial Sequence:  Enzymatic Nucleic Acid
guucuacccugaugaggccguuaggccgaaagugugga

SEQ ID NO: 9082 - RNA, 38 nt, Artificial Sequence
  Description of Artificial Sequence:  Enzymatic Nucleic Acid
ugugguuccugaugaggccguuaggccgaaaccaagug

SEQ ID NO: 9083 - RNA, 38 nt, Artificial Sequence
  Description of Artificial Sequence:  Enzymatic Nucleic Acid
gauguuuccugaugaggccguuaggccgaaaugcuugu

SEQ ID NO: 9084 - RNA, 38 nt, Artificial Sequence
  Description of Artificial Sequence:  Enzymatic Nucleic Acid
uuguuuagcugaugaggccguuaggccgaaauguuucu

SEQ ID NO: 9085 - RNA, 38 nt, Artificial Sequence
  Description of Artificial Sequence:  Enzymatic Nucleic Acid
agauuguucugaugaggccguuaggccgaaaggauguu

SEQ ID NO: 9086 - RNA, 38 nt, Artificial Sequence
  Description of Artificial Sequence:  Enzymatic Nucleic Acid
ucgaugaacugaugaggccguuaggccgaaauuguuua

SEQ ID NO: 9087 - RNA, 38 nt, Artificial Sequence
  Description of Artificial Sequence:  Enzymatic Nucleic Acid
ccucgaugcugaugaggccguuaggccgaaagauuguu

SEQ ID NO: 9088 - RNA, 38 nt, Artificial Sequence
  Description of Artificial Sequence:  Enzymatic Nucleic Acid
gccucgaucugaugaggccguuaggccgaaaagauugu

SEQ ID NO: 9089 - RNA, 38 nt, Artificial Sequence
  Description of Artificial Sequence:  Enzymatic Nucleic Acid
gaugccuccugaugaggccguuaggccgaaaugaagau

SEQ ID NO: 9090 - RNA, 38 nt, Artificial Sequence
  Description of Artificial Sequence:  Enzymatic Nucleic Acid
uggaccuccugaugaggccguuaggccgaaaugccucg

SEQ ID NO: 9091 - RNA, 38 nt, Artificial Sequence
  Description of Artificial Sequence:  Enzymatic Nucleic Acid
uugggaugcugaugaggccguuaggccgaaaccucgau

SEQ ID NO: 9092 - RNA, 38 nt, Artificial Sequence
  Description of Artificial Sequence:  Enzymatic Nucleic Acid
uuuauuggcugaugaggccguuaggccgaaauggaccu

SEQ ID NO: 9093 - RNA, 38 nt, Artificial Sequence
  Description of Artificial Sequence:  Enzymatic Nucleic Acid
cugauuuucugaugaggccguuaggccgaaauugggau

SEQ ID NO: 9094 - RNA, 38 nt, Artificial Sequence
  Description of Artificial Sequence:  Enzymatic Nucleic Acid
ggucuccucugaugaggccguuaggccgaaauuuuuau

SEQ ID NO: 9095 - RNA, 38 nt, Artificial Sequence
  Description of Artificial Sequence:  Enzymatic Nucleic Acid
gucuaugacugaugaggccguuaggccgaaagccaggg

SEQ ID NO: 9096 - RNA, 38 nt, Artificial Sequence
  Description of Artificial Sequence:  Enzymatic Nucleic Acid
aggucuaucugaugaggccguuaggccgaaauagccag

SEQ ID NO: 9097 - RNA, 38 nt, Artificial Sequence
  Description of Artificial Sequence:  Enzymatic Nucleic Acid
cuaagguccugaugaggccguuaggccgaaaugauagc

SEQ ID NO: 9098 - RNA, 38 nt, Artificial Sequence
  Description of Artificial Sequence:  Enzymatic Nucleic Acid
cgaagacucugaugaggccguuaggccgaaaggucuau

SEQ ID NO: 9099 - RNA, 38 nt, Artificial Sequence
  Description of Artificial Sequence:  Enzymatic Nucleic Acid
gcgaagaccugaugaggccguuaggccgaaaaggucua

SEQ ID NO: 9100 - RNA, 38 nt, Artificial Sequence
  Description of Artificial Sequence:  Enzymatic Nucleic Acid
ccagcgaacugaugaggccguuaggccgaaacuaaggu

SEQ ID NO: 9101 - RNA, 38 nt, Artificial Sequence
  Description of Artificial Sequence:  Enzymatic Nucleic Acid
uaccagcgcugaugaggccguuaggccgaaagacuaag

SEQ ID NO: 9102 - RNA, 38 nt, Artificial Sequence
  Description of Artificial Sequence:  Enzymatic Nucleic Acid
auaccagccugaugaggccguuaggccgaaaagacuaa

SEQ ID NO: 9103 - RNA, 38 nt, Artificial Sequence
  Description of Artificial Sequence:  Enzymatic Nucleic Acid
agcgaguacugaugaggccguuaggccgaaaccagcga

SEQ ID NO: 9104 - RNA, 38 nt, Artificial Sequence
  Description of Artificial Sequence:  Enzymatic Nucleic Acid
acagcgagcugaugaggccguuaggccgaaauaccagc

SEQ ID NO: 9105 - RNA, 38 nt, Artificial Sequence
  Description of Artificial Sequence:  Enzymatic Nucleic Acid
cagacagccugaugaggccguuaggccgaaaguauacc

SEQ ID NO: 9106 - RNA, 38 nt, Artificial Sequence
  Description of Artificial Sequence:  Enzymatic Nucleic Acid
gguugacacugaugaggccguuaggccgaaacagcgag

SEQ ID NO: 9107 - RNA, 38 nt, Artificial Sequence
  Description of Artificial Sequence:  Enzymatic Nucleic Acid
cgcugguucugaugaggccguuaggccgaaacagacag

SEQ ID NO: 9108 - RNA, 38 nt, Artificial Sequence
  Description of Artificial Sequence:  Enzymatic Nucleic Acid
aaaaaguccugaugaggccguuaggccgaaaccgcugg

SEQ ID NO: 9109 - RNA, 38 nt, Artificial Sequence
  Description of Artificial Sequence:  Enzymatic Nucleic Acid
cuuaaaaacugaugaggccguuaggccgaaagucaacc

SEQ ID NO: 9110 - RNA, 38 nt, Artificial Sequence
  Description of Artificial Sequence:  Enzymatic Nucleic Acid
gcuuaaaacugaugaggccguuaggccgaaaagucaac

SEQ ID NO: 9111 - RNA, 38 nt, Artificial Sequence
  Description of Artificial Sequence:  Enzymatic Nucleic Acid
ggcuuaaacugaugaggccguuaggccgaaaaagucaa

SEQ ID NO: 9112 - RNA, 38 nt, Artificial Sequence
  Description of Artificial Sequence:  Enzymatic Nucleic Acid
aggcuuaacugaugaggccguuaggccgaaaaaaguca

SEQ ID NO: 9113 - RNA, 38 nt, Artificial Sequence
  Description of Artificial Sequence:  Enzymatic Nucleic Acid
aaggcuuacugaugaggccguuaggccgaaaaaaaguc

SEQ ID NO: 9114 - RNA, 38 nt, Artificial Sequence
  Description of Artificial Sequence:  Enzymatic Nucleic Acid
gaaggcuucugaugaggccguuaggccgaaaaaaaagu

SEQ ID NO: 9115 - RNA, 38 nt, Artificial Sequence
  Description of Artificial Sequence:  Enzymatic Nucleic Acid
agaaggcucugaugaggccguuaggccgaaaaaaaaag

SEQ ID NO: 9116 - RNA, 38 nt, Artificial Sequence
  Description of Artificial Sequence:  Enzymatic Nucleic Acid
gaaaaaagcugaugaggccguuaggccgaaaggcuuaa

SEQ ID NO: 9117 - RNA, 38 nt, Artificial Sequence
  Description of Artificial Sequence:  Enzymatic Nucleic Acid
agaaaaaacugaugaggccguuaggccgaaaaggcuua

SEQ ID NO: 9118 - RNA, 38 nt, Artificial Sequence
  Description of Artificial Sequence:  Enzymatic Nucleic Acid
agagaaaacugaugaggccguuaggccgaaagaaggcu

SEQ ID NO: 9119 - RNA, 38 nt, Artificial Sequence
  Description of Artificial Sequence:  Enzymatic Nucleic Acid
aagagaaacugaugaggccguuaggccgaaaagaaggc

SEQ ID NO: 9120 - RNA, 38 nt, Artificial Sequence
  Description of Artificial Sequence:  Enzymatic Nucleic Acid
aaagagaacugaugaggccguuaggccgaaaaagaagg

SEQ ID NO: 9121 - RNA, 38 nt, Artificial Sequence
  Description of Artificial Sequence:  Enzymatic Nucleic Acid
aaaagagacugaugaggccguuaggccgaaaaaagaag

SEQ ID NO: 9122 - RNA, 38 nt, Artificial Sequence
  Description of Artificial Sequence:  Enzymatic Nucleic Acid
uaaaagagcugaugaggccguuaggccgaaaaaaagaa

SEQ ID NO: 9123 - RNA, 38 nt, Artificial Sequence
  Description of Artificial Sequence:  Enzymatic Nucleic Acid
guaaaagacugaugaggccguuaggccgaaaaaaaaga

SEQ ID NO: 9124 - RNA, 38 nt, Artificial Sequence
  Description of Artificial Sequence:  Enzymatic Nucleic Acid
ugguaaaacugaugaggccguuaggccgaaagaaaaaa

SEQ ID NO: 9125 - RNA, 38 nt, Artificial Sequence
  Description of Artificial Sequence:  Enzymatic Nucleic Acid
acugguaacugaugaggccguuaggccgaaagagaaaa

SEQ ID NO: 9126 - RNA, 38 nt, Artificial Sequence
  Description of Artificial Sequence:  Enzymatic Nucleic Acid
aacugguacugaugaggccguuaggccgaaaagagaaa

SEQ ID NO: 9127 - RNA, 38 nt, Artificial Sequence
  Description of Artificial Sequence:  Enzymatic Nucleic Acid
aaacuggucugaugaggccguuaggccgaaaaagagaa

SEQ ID NO: 9128 - RNA, 38 nt, Artificial Sequence
  Description of Artificial Sequence:  Enzymatic Nucleic Acid
gaaacuggcugaugaggccguuaggccgaaaaaagaga

SEQ ID NO: 9129 - RNA, 38 nt, Artificial Sequence
  Description of Artificial Sequence:  Enzymatic Nucleic Acid
gcuccagacugaugaggccguuaggccgaaacugguaa

SEQ ID NO: 9130 - RNA, 38 nt, Artificial Sequence
  Description of Artificial Sequence:  Enzymatic Nucleic Acid
ugcuccagcugaugaggccguuaggccgaaaacuggua

SEQ ID NO: 9131 - RNA, 38 nt, Artificial Sequence
  Description of Artificial Sequence:  Enzymatic Nucleic Acid
uugcuccacugaugaggccguuaggccgaaaaacuggu

SEQ ID NO: 9132 - RNA, 38 nt, Artificial Sequence
  Description of Artificial Sequence:  Enzymatic Nucleic Acid
gcaaacugcugaugaggccguuaggccgaaauuugcuc

SEQ ID NO: 9133 - RNA, 38 nt, Artificial Sequence
  Description of Artificial Sequence:  Enzymatic Nucleic Acid
ggcaaacucugaugaggccguuaggccgaaaauuugcu

SEQ ID NO: 9134 - RNA, 38 nt, Artificial Sequence
  Description of Artificial Sequence:  Enzymatic Nucleic Acid
ggaaggcacugaugaggccguuaggccgaaacugaauu

SEQ ID NO: 9135 - RNA, 38 nt, Artificial Sequence
  Description of Artificial Sequence:  Enzymatic Nucleic Acid
aggaaggccugaugaggccguuaggccgaaaacugaau

SEQ ID NO: 9136 - RNA, 38 nt, Artificial Sequence
  Description of Artificial Sequence:  Enzymatic Nucleic Acid
aauccaggcugaugaggccguuaggccgaaaggcaaac

SEQ ID NO: 9137 - RNA, 38 nt, Artificial Sequence
  Description of Artificial Sequence:  Enzymatic Nucleic Acid
aaauccagcugaugaggccguuaggccgaaaaggcaaa

SEQ ID NO: 9138 - RNA, 38 nt, Artificial Sequence
  Description of Artificial Sequence:  Enzymatic Nucleic Acid
aauuuacacugaugaggccguuaggccgaaauccagga

SEQ ID NO: 9139 - RNA, 38 nt, Artificial Sequence
  Description of Artificial Sequence:  Enzymatic Nucleic Acid
caauuuaccugaugaggccguuaggccgaaaauccagg

SEQ ID NO: 9140 - RNA, 38 nt, Artificial Sequence
  Description of Artificial Sequence:  Enzymatic Nucleic Acid
uuacaauucugaugaggccguuaggccgaaacaaaucc

SEQ ID NO: 9141 - RNA, 38 nt, Artificial Sequence
  Description of Artificial Sequence:  Enzymatic Nucleic Acid
gucauuaccugaugaggccguuaggccgaaauuuacaa

SEQ ID NO: 9142 - RNA, 38 nt, Artificial Sequence
  Description of Artificial Sequence:  Enzymatic Nucleic Acid
gaggucaucugaugaggccguuaggccgaaacaauuua

SEQ ID NO: 9143 - RNA, 38 nt, Artificial Sequence
  Description of Artificial Sequence:  Enzymatic Nucleic Acid
aaaguuuucugaugaggccguuaggccgaaaggucauu

SEQ ID NO: 9144 - RNA, 38 nt, Artificial Sequence
  Description of Artificial Sequence:  Enzymatic Nucleic Acid
aacugcuacugaugaggccguuaggccgaaaguuuuga

SEQ ID NO: 9145 - RNA, 38 nt, Artificial Sequence
  Description of Artificial Sequence:  Enzymatic Nucleic Acid
gaacugcucugaugaggccguuaggccgaaaaguuuug

SEQ ID NO: 9146 - RNA, 38 nt, Artificial Sequence
  Description of Artificial Sequence:  Enzymatic Nucleic Acid
agaacugccugaugaggccguuaggccgaaaaaguuuu

SEQ ID NO: 9147 - RNA, 38 nt, Artificial Sequence
  Description of Artificial Sequence:  Enzymatic Nucleic Acid
gauggaagcugaugaggccguuaggccgaaacugcuaa

SEQ ID NO: 9148 - RNA, 38 nt, Artificial Sequence
  Description of Artificial Sequence:  Enzymatic Nucleic Acid
agauggaacugaugaggccguuaggccgaaaacugcua

SEQ ID NO: 9149 - RNA, 38 nt, Artificial Sequence
  Description of Artificial Sequence:  Enzymatic Nucleic Acid
ucagauggcugaugaggccguuaggccgaaagaacugc

SEQ ID NO: 9150 - RNA, 38 nt, Artificial Sequence
  Description of Artificial Sequence:  Enzymatic Nucleic Acid
gucagaugcugaugaggccguuaggccgaaaagaacug

SEQ ID NO: 9151 - RNA, 38 nt, Artificial Sequence
  Description of Artificial Sequence:  Enzymatic Nucleic Acid
cugagucacugaugaggccguuaggccgaaauggaaga

SEQ ID NO: 9152 - RNA, 38 nt, Artificial Sequence
  Description of Artificial Sequence:  Enzymatic Nucleic Acid
gcaaaccucugaugaggccguuaggccgaaagucagau

SEQ ID NO: 9153 - RNA, 38 nt, Artificial Sequence
  Description of Artificial Sequence:  Enzymatic Nucleic Acid
gagaagcacugaugaggccguuaggccgaaaccugagu

SEQ ID NO: 9154 - RNA, 38 nt, Artificial Sequence
  Description of Artificial Sequence:  Enzymatic Nucleic Acid
agagaagccugaugaggccguuaggccgaaaaccugag

SEQ ID NO: 9155 - RNA, 38 nt, Artificial Sequence
  Description of Artificial Sequence:  Enzymatic Nucleic Acid
cgccagagcugaugaggccguuaggccgaaagcaaacc

SEQ ID NO: 9156 - RNA, 38 nt, Artificial Sequence
  Description of Artificial Sequence:  Enzymatic Nucleic Acid
ccgccagacugaugaggccguuaggccgaaaagcaaac

SEQ ID NO: 9157 - RNA, 38 nt, Artificial Sequence
  Description of Artificial Sequence:  Enzymatic Nucleic Acid
gaccgccacugaugaggccguuaggccgaaagaagcaa

SEQ ID NO: 9158 - RNA, 38 nt, Artificial Sequence
  Description of Artificial Sequence:  Enzymatic Nucleic Acid
auucugaacugaugaggccguuaggccgaaaccgccag

SEQ ID NO: 9159 - RNA, 38 nt, Artificial Sequence
  Description of Artificial Sequence:  Enzymatic Nucleic Acid
ugauucugcugaugaggccguuaggccgaaagaccgcc

SEQ ID NO: 9160 - RNA, 38 nt, Artificial Sequence
  Description of Artificial Sequence:  Enzymatic Nucleic Acid
uugauucucugaugaggccguuaggccgaaaagaccgc

SEQ ID NO: 9161 - RNA, 38 nt, Artificial Sequence
  Description of Artificial Sequence:  Enzymatic Nucleic Acid
uggauguucugaugaggccguuaggccgaaauucugaa

SEQ ID NO: 9162 - RNA, 38 nt, Artificial Sequence
  Description of Artificial Sequence:  Enzymatic Nucleic Acid
gaagugugcugaugaggccguuaggccgaaauguugau

SEQ ID NO: 9163 - RNA, 38 nt, Artificial Sequence
  Description of Artificial Sequence:  Enzymatic Nucleic Acid
aaucacggcugaugaggccguuaggccgaaagugugga

SEQ ID NO: 9164 - RNA, 38 nt, Artificial Sequence
  Description of Artificial Sequence:  Enzymatic Nucleic Acid
uaaucacgcugaugaggccguuaggccgaaaagugugg

SEQ ID NO: 9165 - RNA, 38 nt, Artificial Sequence
  Description of Artificial Sequence:  Enzymatic Nucleic Acid
acgcagaucugaugaggccguuaggccgaaaucacgga

SEQ ID NO: 9166 - RNA, 38 nt, Artificial Sequence
  Description of Artificial Sequence:  Enzymatic Nucleic Acid
cacgcagacugaugaggccguuaggccgaaaaucacgg

SEQ ID NO: 9167 - RNA, 38 nt, Artificial Sequence
  Description of Artificial Sequence:  Enzymatic Nucleic Acid
ugcacgcacugaugaggccguuaggccgaaauaaucac

SEQ ID NO: 9168 - RNA, 38 nt, Artificial Sequence
  Description of Artificial Sequence:  Enzymatic Nucleic Acid
uuguccaacugaugaggccguuaggccgaaaugcacgc

SEQ ID NO: 9169 - RNA, 38 nt, Artificial Sequence
  Description of Artificial Sequence:  Enzymatic Nucleic Acid
uuuguccacugaugaggccguuaggccgaaaaugcacg

SEQ ID NO: 9170 - RNA, 38 nt, Artificial Sequence
  Description of Artificial Sequence:  Enzymatic Nucleic Acid
cuuugucccugaugaggccguuaggccgaaaaaugcac

SEQ ID NO: 9171 - RNA, 38 nt, Artificial Sequence
  Description of Artificial Sequence:  Enzymatic Nucleic Acid
cugguuggcugaugaggccguuaggccgaaagcuuugu

SEQ ID NO: 9172 - RNA, 38 nt, Artificial Sequence
  Description of Artificial Sequence:  Enzymatic Nucleic Acid
ccugguugcugaugaggccguuaggccgaaaagcuuug

SEQ ID NO: 9173 - RNA, 38 nt, Artificial Sequence
  Description of Artificial Sequence:  Enzymatic Nucleic Acid
ucuucccgcugaugaggccguuaggccgaaauccuggu

SEQ ID NO: 9174 - RNA, 38 nt, Artificial Sequence
  Description of Artificial Sequence:  Enzymatic Nucleic Acid
ugcugaaacugaugaggccguuaggccgaaaucaccag

SEQ ID NO: 9175 - RNA, 38 nt, Artificial Sequence
  Description of Artificial Sequence:  Enzymatic Nucleic Acid
ccugcugacugaugaggccguuaggccgaaagaucacc

SEQ ID NO: 9176 - RNA, 38 nt, Artificial Sequence
  Description of Artificial Sequence:  Enzymatic Nucleic Acid
accugcugcugaugaggccguuaggccgaaaagaucac

SEQ ID NO: 9177 - RNA, 38 nt, Artificial Sequence
  Description of Artificial Sequence:  Enzymatic Nucleic Acid
aaccugcucugaugaggccguuaggccgaaaaagauca

SEQ ID NO: 9178 - RNA, 38 nt, Artificial Sequence
  Description of Artificial Sequence:  Enzymatic Nucleic Acid
caugaagacugaugaggccguuaggccgaaaccugcug

SEQ ID NO: 9179 - RNA, 38 nt, Artificial Sequence
  Description of Artificial Sequence:  Enzymatic Nucleic Acid
ccaugaagcugaugaggccguuaggccgaaaaccugcu

SEQ ID NO: 9180 - RNA, 38 nt, Artificial Sequence
  Description of Artificial Sequence:  Enzymatic Nucleic Acid
uccaugaacugaugaggccguuaggccgaaaaaccugc

SEQ ID NO: 9181 - RNA, 38 nt, Artificial Sequence
  Description of Artificial Sequence:  Enzymatic Nucleic Acid
ccuccaugcugaugaggccguuaggccgaaagaaaccu

SEQ ID NO: 9182 - RNA, 38 nt, Artificial Sequence
  Description of Artificial Sequence:  Enzymatic Nucleic Acid
uccuccaucugaugaggccguuaggccgaaaagaaacc

SEQ ID NO: 9183 - RNA, 38 nt, Artificial Sequence
  Description of Artificial Sequence:  Enzymatic Nucleic Acid
uauguauucugaugaggccguuaggccgaaaguuccuc

SEQ ID NO: 9184 - RNA, 38 nt, Artificial Sequence
  Description of Artificial Sequence:  Enzymatic Nucleic Acid
guauguaucugaugaggccguuaggccgaaaaguuccu

SEQ ID NO: 9185 - RNA, 38 nt, Artificial Sequence
  Description of Artificial Sequence:  Enzymatic Nucleic Acid
acgguaugcugaugaggccguuaggccgaaauuaaguu

SEQ ID NO: 9186 - RNA, 38 nt, Artificial Sequence
  Description of Artificial Sequence:  Enzymatic Nucleic Acid
ucugacggcugaugaggccguuaggccgaaauguauua

SEQ ID NO: 9187 - RNA, 38 nt, Artificial Sequence
  Description of Artificial Sequence:  Enzymatic Nucleic Acid
cugcuucucugaugaggccguuaggccgaaacgguaug

SEQ ID NO: 9188 - RNA, 38 nt, Artificial Sequence
  Description of Artificial Sequence:  Enzymatic Nucleic Acid
uuaaguaccugaugaggccguuaggccgaaacucccug

SEQ ID NO: 9189 - RNA, 38 nt, Artificial Sequence
  Description of Artificial Sequence:  Enzymatic Nucleic Acid
uauuuaagcugaugaggccguuaggccgaaacuacucc

SEQ ID NO: 9190 - RNA, 38 nt, Artificial Sequence
  Description of Artificial Sequence:  Enzymatic Nucleic Acid
ugauauuucugaugaggccguuaggccgaaaguacuac

SEQ ID NO: 9191 - RNA, 38 nt, Artificial Sequence
  Description of Artificial Sequence:  Enzymatic Nucleic Acid
uugauauucugaugaggccguuaggccgaaaaguacua

SEQ ID NO: 9192 - RNA, 38 nt, Artificial Sequence
  Description of Artificial Sequence:  Enzymatic Nucleic Acid
guucuugacugaugaggccguuaggccgaaauuuaagu

SEQ ID NO: 9193 - RNA, 38 nt, Artificial Sequence
  Description of Artificial Sequence:  Enzymatic Nucleic Acid
caguucuucugaugaggccguuaggccgaaauauuuaa

SEQ ID NO: 9194 - RNA, 38 nt, Artificial Sequence
  Description of Artificial Sequence:  Enzymatic Nucleic Acid
uccugaaucugaugaggccguuaggccgaaaggcaguu

SEQ ID NO: 9195 - RNA, 38 nt, Artificial Sequence
  Description of Artificial Sequence:  Enzymatic Nucleic Acid
agguccugcugaugaggccguuaggccgaaauuaggca

SEQ ID NO: 9196 - RNA, 38 nt, Artificial Sequence
  Description of Artificial Sequence:  Enzymatic Nucleic Acid
gagguccucugaugaggccguuaggccgaaaauuaggc

SEQ ID NO: 9197 - RNA, 38 nt, Artificial Sequence
  Description of Artificial Sequence:  Enzymatic Nucleic Acid
aucaugugcugaugaggccguuaggccgaaagguccug

SEQ ID NO: 9198 - RNA, 38 nt, Artificial Sequence
  Description of Artificial Sequence:  Enzymatic Nucleic Acid
aaaccucccugaugaggccguuaggccgaaaucaugug

SEQ ID NO: 9199 - RNA, 38 nt, Artificial Sequence
  Description of Artificial Sequence:  Enzymatic Nucleic Acid
gaaauguacugaugaggccguuaggccgaaaccuccua

SEQ ID NO: 9200 - RNA, 38 nt, Artificial Sequence
  Description of Artificial Sequence:  Enzymatic Nucleic Acid
ugaaaugucugaugaggccguuaggccgaaaaccuccu

SEQ ID NO: 9201 - RNA, 38 nt, Artificial Sequence
  Description of Artificial Sequence:  Enzymatic Nucleic Acid
uugaaaugcugaugaggccguuaggccgaaaaaccucc

SEQ ID NO: 9202 - RNA, 38 nt, Artificial Sequence
  Description of Artificial Sequence:  Enzymatic Nucleic Acid
uaacuugacugaugaggccguuaggccgaaauguaaac

SEQ ID NO: 9203 - RNA, 38 nt, Artificial Sequence
  Description of Artificial Sequence:  Enzymatic Nucleic Acid
auaacuugcugaugaggccguuaggccgaaaauguaaa

SEQ ID NO: 9204 - RNA, 38 nt, Artificial Sequence
  Description of Artificial Sequence:  Enzymatic Nucleic Acid
uauaacuucugaugaggccguuaggccgaaaaauguaa

SEQ ID NO: 9205 - RNA, 38 nt, Artificial Sequence
  Description of Artificial Sequence:  Enzymatic Nucleic Acid
ucuauuaucugaugaggccguuaggccgaaacuugaaa

SEQ ID NO: 9206 - RNA, 38 nt, Artificial Sequence
  Description of Artificial Sequence:  Enzymatic Nucleic Acid
aucuauuacugaugaggccguuaggccgaaaacuugaa

SEQ ID NO: 9207 - RNA, 38 nt, Artificial Sequence
  Description of Artificial Sequence:  Enzymatic Nucleic Acid
ccaucuaucugaugaggccguuaggccgaaauaacuug

SEQ ID NO: 9208 - RNA, 38 nt, Artificial Sequence
  Description of Artificial Sequence:  Enzymatic Nucleic Acid
cuuccauccugaugaggccguuaggccgaaauuauaac

SEQ ID NO: 9209 - RNA, 38 nt, Artificial Sequence
  Description of Artificial Sequence:  Enzymatic Nucleic Acid
cuucuggacugaugaggccguuaggccgaaauucucuu

SEQ ID NO: 9210 - RNA, 38 nt, Artificial Sequence
  Description of Artificial Sequence:  Enzymatic Nucleic Acid
ccuucuggcugaugaggccguuaggccgaaaauucucu

SEQ ID NO: 9211 - RNA, 38 nt, Artificial Sequence
  Description of Artificial Sequence:  Enzymatic Nucleic Acid
accuucugcugaugaggccguuaggccgaaaaauucuc

SEQ ID NO: 9212 - RNA, 38 nt, Artificial Sequence
  Description of Artificial Sequence:  Enzymatic Nucleic Acid
cuuugauccugaugaggccguuaggccgaaaccuucac

SEQ ID NO: 9213 - RNA, 38 nt, Artificial Sequence
  Description of Artificial Sequence:  Enzymatic Nucleic Acid
ccuucuuucugaugaggccguuaggccgaaaucuaccu

SEQ ID NO: 9214 - RNA, 38 nt, Artificial Sequence
  Description of Artificial Sequence:  Enzymatic Nucleic Acid
caacagcucugaugaggccguuaggccgaaauuuggcu

SEQ ID NO: 9215 - RNA, 38 nt, Artificial Sequence
  Description of Artificial Sequence:  Enzymatic Nucleic Acid
ucaacagccugaugaggccguuaggccgaaaauuuggc

SEQ ID NO: 9216 - RNA, 38 nt, Artificial Sequence
  Description of Artificial Sequence:  Enzymatic Nucleic Acid
aguaucuccugaugaggccguuaggccgaaacagcuaa

SEQ ID NO: 9217 - RNA, 38 nt, Artificial Sequence
  Description of Artificial Sequence:  Enzymatic Nucleic Acid
uuauuaagcugaugaggccguuaggccgaaaucucaac

SEQ ID NO: 9218 - RNA, 38 nt, Artificial Sequence
  Description of Artificial Sequence:  Enzymatic Nucleic Acid
uccuuauucugaugaggccguuaggccgaaaguaucuc

SEQ ID NO: 9219 - RNA, 38 nt, Artificial Sequence
  Description of Artificial Sequence:  Enzymatic Nucleic Acid
uuccuuaucugaugaggccguuaggccgaaaaguaucu

SEQ ID NO: 9220 - RNA, 38 nt, Artificial Sequence
  Description of Artificial Sequence:  Enzymatic Nucleic Acid
cuuuuccucugaugaggccguuaggccgaaauuaagua

SEQ ID NO: 9221 - RNA, 38 nt, Artificial Sequence
  Description of Artificial Sequence:  Enzymatic Nucleic Acid
aaaggacucugaugaggccguuaggccgaaacugccuu

SEQ ID NO: 9222 - RNA, 38 nt, Artificial Sequence
  Description of Artificial Sequence:  Enzymatic Nucleic Acid
uaaaggaccugaugaggccguuaggccgaaaacugccu

SEQ ID NO: 9223 - RNA, 38 nt, Artificial Sequence
  Description of Artificial Sequence:  Enzymatic Nucleic Acid
uaauaaagcugaugaggccguuaggccgaaacuaacug

SEQ ID NO: 9224 - RNA, 38 nt, Artificial Sequence
  Description of Artificial Sequence:  Enzymatic Nucleic Acid
caauaauacugaugaggccguuaggccgaaaggacuaa

SEQ ID NO: 9225 - RNA, 38 nt, Artificial Sequence
  Description of Artificial Sequence:  Enzymatic Nucleic Acid
ucaauaaucugaugaggccguuaggccgaaaaggacua

SEQ ID NO: 9226 - RNA, 38 nt, Artificial Sequence
  Description of Artificial Sequence:  Enzymatic Nucleic Acid
gucaauaacugaugaggccguuaggccgaaaaaggacu

SEQ ID NO: 9227 - RNA, 38 nt, Artificial Sequence
  Description of Artificial Sequence:  Enzymatic Nucleic Acid
uugucaaucugaugaggccguuaggccgaaauaaagga

SEQ ID NO: 9228 - RNA, 38 nt, Artificial Sequence
  Description of Artificial Sequence:  Enzymatic Nucleic Acid
guugucaacugaugaggccguuaggccgaaaauaaagg

SEQ ID NO: 9229 - RNA, 38 nt, Artificial Sequence
  Description of Artificial Sequence:  Enzymatic Nucleic Acid
uuguuguccugaugaggccguuaggccgaaauaauaaa

SEQ ID NO: 9230 - RNA, 38 nt, Artificial Sequence
  Description of Artificial Sequence:  Enzymatic Nucleic Acid
uucugaagcugaugaggccguuaggccgaaauucguug

SEQ ID NO: 9231 - RNA, 38 nt, Artificial Sequence
  Description of Artificial Sequence:  Enzymatic Nucleic Acid
cuucugaacugaugaggccguuaggccgaaaauucguu

SEQ ID NO: 9232 - RNA, 38 nt, Artificial Sequence
  Description of Artificial Sequence:  Enzymatic Nucleic Acid
uccuucugcugaugaggccguuaggccgaaagaauucg

SEQ ID NO: 9233 - RNA, 38 nt, Artificial Sequence
  Description of Artificial Sequence:  Enzymatic Nucleic Acid
auccuucucugaugaggccguuaggccgaaaagaauuc

SEQ ID NO: 9234 - RNA, 38 nt, Artificial Sequence
  Description of Artificial Sequence:  Enzymatic Nucleic Acid
ccauggaucugaugaggccguuaggccgaaauccuucu

SEQ ID NO: 9235 - RNA, 38 nt, Artificial Sequence
  Description of Artificial Sequence:  Enzymatic Nucleic Acid
cccauggacugaugaggccguuaggccgaaaauccuuc

SEQ ID NO: 9236 - RNA, 38 nt, Artificial Sequence
  Description of Artificial Sequence:  Enzymatic Nucleic Acid
uccccaugcugaugaggccguuaggccgaaauaauccu

SEQ ID NO: 9237 - RNA, 38 nt, Artificial Sequence
  Description of Artificial Sequence:  Enzymatic Nucleic Acid
gccuaugucugaugaggccguuaggccgaaauucccca

SEQ ID NO: 9238 - RNA, 38 nt, Artificial Sequence
  Description of Artificial Sequence:  Enzymatic Nucleic Acid
ggccuaugcugaugaggccguuaggccgaaaauucccc

SEQ ID NO: 9239 - RNA, 38 nt, Artificial Sequence
  Description of Artificial Sequence:  Enzymatic Nucleic Acid
auaaggcccugaugaggccguuaggccgaaauguaauu

SEQ ID NO: 9240 - RNA, 38 nt, Artificial Sequence
  Description of Artificial Sequence:  Enzymatic Nucleic Acid
cuauugaucugaugaggccguuaggccgaaaggccuau

SEQ ID NO: 9241 - RNA, 38 nt, Artificial Sequence
  Description of Artificial Sequence:  Enzymatic Nucleic Acid
ucuauugacugaugaggccguuaggccgaaaaggccua

SEQ ID NO: 9242 - RNA, 38 nt, Artificial Sequence
  Description of Artificial Sequence:  Enzymatic Nucleic Acid
auucuauucugaugaggccguuaggccgaaauaaggcc

SEQ ID NO: 9243 - RNA, 38 nt, Artificial Sequence
  Description of Artificial Sequence:  Enzymatic Nucleic Acid
ggcaauuccugaugaggccguuaggccgaaauugauaa

SEQ ID NO: 9244 - RNA, 38 nt, Artificial Sequence
  Description of Artificial Sequence:  Enzymatic Nucleic Acid
uucugggccugaugaggccguuaggccgaaauucuauu

SEQ ID NO: 9245 - RNA, 38 nt, Artificial Sequence
  Description of Artificial Sequence:  Enzymatic Nucleic Acid
uuuacagucugaugaggccguuaggccgaaagucuuuu

SEQ ID NO: 9246 - RNA, 38 nt, Artificial Sequence
  Description of Artificial Sequence:  Enzymatic Nucleic Acid
ucauaauucugaugaggccguuaggccgaaacaguuag

SEQ ID NO: 9247 - RNA, 38 nt, Artificial Sequence
  Description of Artificial Sequence:  Enzymatic Nucleic Acid
cuguucaucugaugaggccguuaggccgaaauuuacag

SEQ ID NO: 9248 - RNA, 38 nt, Artificial Sequence
  Description of Artificial Sequence:  Enzymatic Nucleic Acid
acuguucacugaugaggccguuaggccgaaaauuuaca

SEQ ID NO: 9249 - RNA, 38 nt, Artificial Sequence
  Description of Artificial Sequence:  Enzymatic Nucleic Acid
gcaccccccugaugaggccguuaggccgaaaugcacac

SEQ ID NO: 9250 - RNA, 38 nt, Artificial Sequence
  Description of Artificial Sequence:  Enzymatic Nucleic Acid
uauaaugacugaugaggccguuaggccgaaauccuucu

SEQ ID NO: 9251 - RNA, 38 nt, Artificial Sequence
  Description of Artificial Sequence:  Enzymatic Nucleic Acid
uuauaaugcugaugaggccguuaggccgaaaauccuuc

SEQ ID NO: 9252 - RNA, 38 nt, Artificial Sequence
  Description of Artificial Sequence:  Enzymatic Nucleic Acid
uuuauaaucugaugaggccguuaggccgaaaaauccuu

SEQ ID NO: 9253 - RNA, 38 nt, Artificial Sequence
  Description of Artificial Sequence:  Enzymatic Nucleic Acid
gcauuuaucugaugaggccguuaggccgaaaugaaauc

SEQ ID NO: 9254 - RNA, 38 nt, Artificial Sequence
  Description of Artificial Sequence:  Enzymatic Nucleic Acid
ugcauuuacugaugaggccguuaggccgaaaaugaaau

SEQ ID NO: 9255 - RNA, 38 nt, Artificial Sequence
  Description of Artificial Sequence:  Enzymatic Nucleic Acid
uuugcauucugaugaggccguuaggccgaaauaaugaa

SEQ ID NO: 9256 - RNA, 38 nt, Artificial Sequence
  Description of Artificial Sequence:  Enzymatic Nucleic Acid
caauacuacugaugaggccguuaggccgaaauucuuuc

SEQ ID NO: 9257 - RNA, 38 nt, Artificial Sequence
  Description of Artificial Sequence:  Enzymatic Nucleic Acid
accaauaccugaugaggccguuaggccgaaauauucuu

SEQ ID NO: 9258 - RNA, 38 nt, Artificial Sequence
  Description of Artificial Sequence:  Enzymatic Nucleic Acid
uguaccaacugaugaggccguuaggccgaaacuauauu

SEQ ID NO: 9259 - RNA, 38 nt, Artificial Sequence
  Description of Artificial Sequence:  Enzymatic Nucleic Acid
ccuguacccugaugaggccguuaggccgaaauacuaua

SEQ ID NO: 9260 - RNA, 38 nt, Artificial Sequence
  Description of Artificial Sequence:  Enzymatic Nucleic Acid
agaaccugcugaugaggccguuaggccgaaaccaauac

SEQ ID NO: 9261 - RNA, 38 nt, Artificial Sequence
  Description of Artificial Sequence:  Enzymatic Nucleic Acid
uuuaguagcugaugaggccguuaggccgaaaccuguac

SEQ ID NO: 9262 - RNA, 38 nt, Artificial Sequence
  Description of Artificial Sequence:  Enzymatic Nucleic Acid
guuuaguacugaugaggccguuaggccgaaaaccugua

SEQ ID NO: 9263 - RNA, 38 nt, Artificial Sequence
  Description of Artificial Sequence:  Enzymatic Nucleic Acid
cuguuuagcugaugaggccguuaggccgaaagaaccug

SEQ ID NO: 9264 - RNA, 38 nt, Artificial Sequence
  Description of Artificial Sequence:  Enzymatic Nucleic Acid
uuccuguucugaugaggccguuaggccgaaaguagaac

SEQ ID NO: 9265 - RNA, 38 nt, Artificial Sequence
  Description of Artificial Sequence:  Enzymatic Nucleic Acid
uagcggcccugaugaggccguuaggccgaaauuguuuu

SEQ ID NO: 9266 - RNA, 38 nt, Artificial Sequence
  Description of Artificial Sequence:  Enzymatic Nucleic Acid
ugcaaguucugaugaggccguuaggccgaaagcggcca

SEQ ID NO: 9267 - RNA, 38 nt, Artificial Sequence
  Description of Artificial Sequence:  Enzymatic Nucleic Acid
agauaugccugaugaggccguuaggccgaaaguuuagc

SEQ ID NO: 9268 - RNA, 38 nt, Artificial Sequence
  Description of Artificial Sequence:  Enzymatic Nucleic Acid
ucugaagacugaugaggccguuaggccgaaaugcaagu

SEQ ID NO: 9269 - RNA, 38 nt, Artificial Sequence
  Description of Artificial Sequence:  Enzymatic Nucleic Acid
uaucugaacugaugaggccguuaggccgaaauaugcaa

SEQ ID NO: 9270 - RNA, 38 nt, Artificial Sequence
  Description of Artificial Sequence:  Enzymatic Nucleic Acid
aauaucugcugaugaggccguuaggccgaaagauaugc

SEQ ID NO: 9271 - RNA, 38 nt, Artificial Sequence
  Description of Artificial Sequence:  Enzymatic Nucleic Acid
uaauaucucugaugaggccguuaggccgaaaagauaug

SEQ ID NO: 9272 - RNA, 38 nt, Artificial Sequence
  Description of Artificial Sequence:  Enzymatic Nucleic Acid
ucugauaacugaugaggccguuaggccgaaaucugaag

SEQ ID NO: 9273 - RNA, 38 nt, Artificial Sequence
  Description of Artificial Sequence:  Enzymatic Nucleic Acid
cuucugaucugaugaggccguuaggccgaaauaucuga

SEQ ID NO: 9274 - RNA, 38 nt, Artificial Sequence
  Description of Artificial Sequence:  Enzymatic Nucleic Acid
ucuucugacugaugaggccguuaggccgaaaauaucug

SEQ ID NO: 9275 - RNA, 38 nt, Artificial Sequence
  Description of Artificial Sequence:  Enzymatic Nucleic Acid
uuucuucucugaugaggccguuaggccgaaauaauauc

SEQ ID NO: 9276 - RNA, 38 nt, Artificial Sequence
  Description of Artificial Sequence:  Enzymatic Nucleic Acid
auuucacucugaugaggccguuaggccgaaagguuucu

SEQ ID NO: 9277 - RNA, 38 nt, Artificial Sequence
  Description of Artificial Sequence:  Enzymatic Nucleic Acid
gguagucacugaugaggccguuaggccgaaauuucacu

SEQ ID NO: 9278 - RNA, 38 nt, Artificial Sequence
  Description of Artificial Sequence:  Enzymatic Nucleic Acid
aggacaggcugaugaggccguuaggccgaaagucagau

SEQ ID NO: 9279 - RNA, 38 nt, Artificial Sequence
  Description of Artificial Sequence:  Enzymatic Nucleic Acid
aaccagagcugaugaggccguuaggccgaaacagguag

SEQ ID NO: 9280 - RNA, 38 nt, Artificial Sequence
  Description of Artificial Sequence:  Enzymatic Nucleic Acid
aagaaccacugaugaggccguuaggccgaaaggacagg

SEQ ID NO: 9281 - RNA, 38 nt, Artificial Sequence
  Description of Artificial Sequence:  Enzymatic Nucleic Acid
agcaaaagcugaugaggccguuaggccgaaaccagagg

SEQ ID NO: 9282 - RNA, 38 nt, Artificial Sequence
  Description of Artificial Sequence:  Enzymatic Nucleic Acid
uagcaaaacugaugaggccguuaggccgaaaaccagag

SEQ ID NO: 9283 - RNA, 38 nt, Artificial Sequence
  Description of Artificial Sequence:  Enzymatic Nucleic Acid
aguagcaacugaugaggccguuaggccgaaagaaccag

SEQ ID NO: 9284 - RNA, 38 nt, Artificial Sequence
  Description of Artificial Sequence:  Enzymatic Nucleic Acid
uaguagcacugaugaggccguuaggccgaaaagaacca

SEQ ID NO: 9285 - RNA, 38 nt, Artificial Sequence
  Description of Artificial Sequence:  Enzymatic Nucleic Acid
guaguagccugaugaggccguuaggccgaaaaagaacc

SEQ ID NO: 9286 - RNA, 38 nt, Artificial Sequence
  Description of Artificial Sequence:  Enzymatic Nucleic Acid
acacguagcugaugaggccguuaggccgaaagcaaaag

SEQ ID NO: 9287 - RNA, 38 nt, Artificial Sequence
  Description of Artificial Sequence:  Enzymatic Nucleic Acid
cucacacgcugaugaggccguuaggccgaaaguagcaa

SEQ ID NO: 9288 - RNA, 38 nt, Artificial Sequence
  Description of Artificial Sequence:  Enzymatic Nucleic Acid
ugcuuuggcugaugaggccguuaggccgaaacucacac

SEQ ID NO: 9289 - RNA, 38 nt, Artificial Sequence
  Description of Artificial Sequence:  Enzymatic Nucleic Acid
ucacuaaacugaugaggccguuaggccgaaaguugcuu

SEQ ID NO: 9290 - RNA, 38 nt, Artificial Sequence
  Description of Artificial Sequence:  Enzymatic Nucleic Acid
ggucacuacugaugaggccguuaggccgaaagaguugc

SEQ ID NO: 9291 - RNA, 38 nt, Artificial Sequence
  Description of Artificial Sequence:  Enzymatic Nucleic Acid
uggucacucugaugaggccguuaggccgaaaagaguug

SEQ ID NO: 9292 - RNA, 38 nt, Artificial Sequence
  Description of Artificial Sequence:  Enzymatic Nucleic Acid
cuggucaccugaugaggccguuaggccgaaaaagaguu

SEQ ID NO: 9293 - RNA, 38 nt, Artificial Sequence
  Description of Artificial Sequence:  Enzymatic Nucleic Acid
ucagaagccugaugaggccguuaggccgaaagugugcu

SEQ ID NO: 9294 - RNA, 38 nt, Artificial Sequence
  Description of Artificial Sequence:  Enzymatic Nucleic Acid
ugauucagcugaugaggccguuaggccgaaagcgagug

SEQ ID NO: 9295 - RNA, 38 nt, Artificial Sequence
  Description of Artificial Sequence:  Enzymatic Nucleic Acid
augauucacugaugaggccguuaggccgaaaagcgagu

SEQ ID NO: 9296 - RNA, 38 nt, Artificial Sequence
  Description of Artificial Sequence:  Enzymatic Nucleic Acid
cagaugaucugaugaggccguuaggccgaaauucagaa

SEQ ID NO: 9297 - RNA, 38 nt, Artificial Sequence
  Description of Artificial Sequence:  Enzymatic Nucleic Acid
cuucagaucugaugaggccguuaggccgaaaugauuca

SEQ ID NO: 9298 - RNA, 38 nt, Artificial Sequence
  Description of Artificial Sequence:  Enzymatic Nucleic Acid
caccuucacugaugaggccguuaggccgaaaugaugau

SEQ ID NO: 9299 - RNA, 38 nt, Artificial Sequence
  Description of Artificial Sequence:  Enzymatic Nucleic Acid
cugcugagcugaugaggccguuaggccgaaagucaccu

SEQ ID NO: 9300 - RNA, 38 nt, Artificial Sequence
  Description of Artificial Sequence:  Enzymatic Nucleic Acid
ucugcugacugaugaggccguuaggccgaaaagucacc

SEQ ID NO: 9301 - RNA, 38 nt, Artificial Sequence
  Description of Artificial Sequence:  Enzymatic Nucleic Acid
uaucugcucugaugaggccguuaggccgaaagaaguca

SEQ ID NO: 9302 - RNA, 38 nt, Artificial Sequence
  Description of Artificial Sequence:  Enzymatic Nucleic Acid
cucugaugcugaugaggccguuaggccgaaaucugcug

SEQ ID NO: 9303 - RNA, 38 nt, Artificial Sequence
  Description of Artificial Sequence:  Enzymatic Nucleic Acid
uuaucucucugaugaggccguuaggccgaaauguaucu

SEQ ID NO: 9304 - RNA, 38 nt, Artificial Sequence
  Description of Artificial Sequence:  Enzymatic Nucleic Acid
uuagaauucugaugaggccguuaggccgaaaucucuga

SEQ ID NO: 9305 - RNA, 38 nt, Artificial Sequence
  Description of Artificial Sequence:  Enzymatic Nucleic Acid
acuguuagcugaugaggccguuaggccgaaauuuaucu

SEQ ID NO: 9306 - RNA, 38 nt, Artificial Sequence
  Description of Artificial Sequence:  Enzymatic Nucleic Acid
cacuguuacugaugaggccguuaggccgaaaauuuauc

SEQ ID NO: 9307 - RNA, 38 nt, Artificial Sequence
  Description of Artificial Sequence:  Enzymatic Nucleic Acid
gucacugucugaugaggccguuaggccgaaagaauuua

SEQ ID NO: 9308 - RNA, 38 nt, Artificial Sequence
  Description of Artificial Sequence:  Enzymatic Nucleic Acid
acuguuuacugaugaggccguuaggccgaaacugucac

SEQ ID NO: 9309 - RNA, 38 nt, Artificial Sequence
  Description of Artificial Sequence:  Enzymatic Nucleic Acid
aacuguuucugaugaggccguuaggccgaaaacuguca

SEQ ID NO: 9310 - RNA, 38 nt, Artificial Sequence
  Description of Artificial Sequence:  Enzymatic Nucleic Acid
gaacuguucugaugaggccguuaggccgaaaaacuguc

SEQ ID NO: 9311 - RNA, 38 nt, Artificial Sequence
  Description of Artificial Sequence:  Enzymatic Nucleic Acid
caacgaagcugaugaggccguuaggccgaaacuguuua

SEQ ID NO: 9312 - RNA, 38 nt, Artificial Sequence
  Description of Artificial Sequence:  Enzymatic Nucleic Acid
gcaacgaacugaugaggccguuaggccgaaaacuguuu

SEQ ID NO: 9313 - RNA, 38 nt, Artificial Sequence
  Description of Artificial Sequence:  Enzymatic Nucleic Acid
aagcaacgcugaugaggccguuaggccgaaagaacugu

SEQ ID NO: 9314 - RNA, 38 nt, Artificial Sequence
  Description of Artificial Sequence:  Enzymatic Nucleic Acid
uaagcaaccugaugaggccguuaggccgaaaagaacug

SEQ ID NO: 9315 - RNA, 38 nt, Artificial Sequence
  Description of Artificial Sequence:  Enzymatic Nucleic Acid
ucauaagccugaugaggccguuaggccgaaacgaagaa

SEQ ID NO: 9316 - RNA, 38 nt, Artificial Sequence
  Description of Artificial Sequence:  Enzymatic Nucleic Acid
ccauucaucugaugaggccguuaggccgaaagcaacga

SEQ ID NO: 9317 - RNA, 38 nt, Artificial Sequence
  Description of Artificial Sequence:  Enzymatic Nucleic Acid
accauucacugaugaggccguuaggccgaaaagcaacg

SEQ ID NO: 9318 - RNA, 38 nt, Artificial Sequence
  Description of Artificial Sequence:  Enzymatic Nucleic Acid
auuucugacugaugaggccguuaggccgaaaccauuca

SEQ ID NO: 9319 - RNA, 38 nt, Artificial Sequence
  Description of Artificial Sequence:  Enzymatic Nucleic Acid
uuauuucucugaugaggccguuaggccgaaagaccauu

SEQ ID NO: 9320 - RNA, 38 nt, Artificial Sequence
  Description of Artificial Sequence:  Enzymatic Nucleic Acid
ccuuugaucugaugaggccguuaggccgaaauuucuga

SEQ ID NO: 9321 - RNA, 38 nt, Artificial Sequence
  Description of Artificial Sequence:  Enzymatic Nucleic Acid
cuuccuuucugaugaggccguuaggccgaaauuauuuc

SEQ ID NO: 9322 - RNA, 38 nt, Artificial Sequence
  Description of Artificial Sequence:  Enzymatic Nucleic Acid
gugccaaacugaugaggccguuaggccgaaaucuuuuu

SEQ ID NO: 9323 - RNA, 38 nt, Artificial Sequence
  Description of Artificial Sequence:  Enzymatic Nucleic Acid
gggugccacugaugaggccguuaggccgaaagaucuuu

SEQ ID NO: 9324 - RNA, 38 nt, Artificial Sequence
  Description of Artificial Sequence:  Enzymatic Nucleic Acid
ugggugcccugaugaggccguuaggccgaaaagaucuu

SEQ ID NO: 9325 - RNA, 38 nt, Artificial Sequence
  Description of Artificial Sequence:  Enzymatic Nucleic Acid
gaaggucacugaugaggccguuaggccgaaaucugggu

SEQ ID NO: 9326 - RNA, 38 nt, Artificial Sequence
  Description of Artificial Sequence:  Enzymatic Nucleic Acid
ggaagguccugaugaggccguuaggccgaaaaucuggg

SEQ ID NO: 9327 - RNA, 38 nt, Artificial Sequence
  Description of Artificial Sequence:  Enzymatic Nucleic Acid
augucaggcugaugaggccguuaggccgaaaggucaaa

SEQ ID NO: 9328 - RNA, 38 nt, Artificial Sequence
  Description of Artificial Sequence:  Enzymatic Nucleic Acid
caugucagcugaugaggccguuaggccgaaaaggucaa

SEQ ID NO: 9329 - RNA, 38 nt, Artificial Sequence
  Description of Artificial Sequence:  Enzymatic Nucleic Acid
ccacaguacugaugaggccguuaggccgaaacuuuguu

SEQ ID NO: 9330 - RNA, 38 nt, Artificial Sequence
  Description of Artificial Sequence:  Enzymatic Nucleic Acid
guccacagcugaugaggccguuaggccgaaauacuuug

SEQ ID NO: 9331 - RNA, 38 nt, Artificial Sequence
  Description of Artificial Sequence:  Enzymatic Nucleic Acid
ccaugccacugaugaggccguuaggccgaaaccucuug

SEQ ID NO: 9332 - RNA, 38 nt, Artificial Sequence
  Description of Artificial Sequence:  Enzymatic Nucleic Acid
uccaugcccugaugaggccguuaggccgaaaaccucuu

SEQ ID NO: 9333 - RNA, 38 nt, Artificial Sequence
  Description of Artificial Sequence:  Enzymatic Nucleic Acid
uucuuuaacugaugaggccguuaggccgaaauccaugc

SEQ ID NO: 9334 - RNA, 38 nt, Artificial Sequence
  Description of Artificial Sequence:  Enzymatic Nucleic Acid
uuucuuuacugaugaggccguuaggccgaaaauccaug

SEQ ID NO: 9335 - RNA, 38 nt, Artificial Sequence
  Description of Artificial Sequence:  Enzymatic Nucleic Acid
auuucuuucugaugaggccguuaggccgaaaaauccau

SEQ ID NO: 9336 - RNA, 38 nt, Artificial Sequence
  Description of Artificial Sequence:  Enzymatic Nucleic Acid
uauuucuucugaugaggccguuaggccgaaaaaaucca

SEQ ID NO: 9337 - RNA, 38 nt, Artificial Sequence
  Description of Artificial Sequence:  Enzymatic Nucleic Acid
auuaauuccugaugaggccguuaggccgaaauuucuuu

SEQ ID NO: 9338 - RNA, 38 nt, Artificial Sequence
  Description of Artificial Sequence:  Enzymatic Nucleic Acid
agccaauucugaugaggccguuaggccgaaauucuauu

SEQ ID NO: 9339 - RNA, 38 nt, Artificial Sequence
  Description of Artificial Sequence:  Enzymatic Nucleic Acid
gagccaaucugaugaggccguuaggccgaaaauucuau

SEQ ID NO: 9340 - RNA, 38 nt, Artificial Sequence
  Description of Artificial Sequence:  Enzymatic Nucleic Acid
ccugagcccugaugaggccguuaggccgaaauuaauuc

SEQ ID NO: 9341 - RNA, 38 nt, Artificial Sequence
  Description of Artificial Sequence:  Enzymatic Nucleic Acid
auccaccucugaugaggccguuaggccgaaagccaauu

SEQ ID NO: 9342 - RNA, 38 nt, Artificial Sequence
  Description of Artificial Sequence:  Enzymatic Nucleic Acid
cuuggccacugaugaggccguuaggccgaaauccaccu

SEQ ID NO: 9343 - RNA, 38 nt, Artificial Sequence
  Description of Artificial Sequence:  Enzymatic Nucleic Acid
acuuggcccugaugaggccguuaggccgaaaauccacc

SEQ ID NO: 9344 - RNA, 38 nt, Artificial Sequence
  Description of Artificial Sequence:  Enzymatic Nucleic Acid
gcuuugaacugaugaggccguuaggccgaaacuuggcc

SEQ ID NO: 9345 - RNA, 38 nt, Artificial Sequence
  Description of Artificial Sequence:  Enzymatic Nucleic Acid
ugcuuugacugaugaggccguuaggccgaaaacuuggc

SEQ ID NO: 9346 - RNA, 38 nt, Artificial Sequence
  Description of Artificial Sequence:  Enzymatic Nucleic Acid
uugcuuugcugaugaggccguuaggccgaaaaacuugg

SEQ ID NO: 9347 - RNA, 38 nt, Artificial Sequence
  Description of Artificial Sequence:  Enzymatic Nucleic Acid
uuugcuuucugaugaggccguuaggccgaaaaaacuug

SEQ ID NO: 9348 - RNA, 38 nt, Artificial Sequence
  Description of Artificial Sequence:  Enzymatic Nucleic Acid
uuuccguccugaugaggccguuaggccgaaauucugug

SEQ ID NO: 9349 - RNA, 38 nt, Artificial Sequence
  Description of Artificial Sequence:  Enzymatic Nucleic Acid
aauaacgucugaugaggccguuaggccgaaagucuuuc

SEQ ID NO: 9350 - RNA, 38 nt, Artificial Sequence
  Description of Artificial Sequence:  Enzymatic Nucleic Acid
uaauaacgcugaugaggccguuaggccgaaaagucuuu

SEQ ID NO: 9351 - RNA, 38 nt, Artificial Sequence
  Description of Artificial Sequence:  Enzymatic Nucleic Acid
cguuuaaucugaugaggccguuaggccgaaacguaagu

SEQ ID NO: 9352 - RNA, 38 nt, Artificial Sequence
  Description of Artificial Sequence:  Enzymatic Nucleic Acid
acguuuaacugaugaggccguuaggccgaaaacguaag

SEQ ID NO: 9353 - RNA, 38 nt, Artificial Sequence
  Description of Artificial Sequence:  Enzymatic Nucleic Acid
acacguuucugaugaggccguuaggccgaaauaacgua

SEQ ID NO: 9354 - RNA, 38 nt, Artificial Sequence
  Description of Artificial Sequence:  Enzymatic Nucleic Acid
aacacguucugaugaggccguuaggccgaaaauaacgu

SEQ ID NO: 9355 - RNA, 38 nt, Artificial Sequence
  Description of Artificial Sequence:  Enzymatic Nucleic Acid
uuauauuucugaugaggccguuaggccgaaacacguuu

SEQ ID NO: 9356 - RNA, 38 nt, Artificial Sequence
  Description of Artificial Sequence:  Enzymatic Nucleic Acid
auuauauucugaugaggccguuaggccgaaaacacguu

SEQ ID NO: 9357 - RNA, 38 nt, Artificial Sequence
  Description of Artificial Sequence:  Enzymatic Nucleic Acid
cguuauuacugaugaggccguuaggccgaaauuuaaca

SEQ ID NO: 9358 - RNA, 38 nt, Artificial Sequence
  Description of Artificial Sequence:  Enzymatic Nucleic Acid
cucguuaucugaugaggccguuaggccgaaauauuuaa

SEQ ID NO: 9359 - RNA, 38 nt, Artificial Sequence
  Description of Artificial Sequence:  Enzymatic Nucleic Acid
cuucucgucugaugaggccguuaggccgaaauuauauu

SEQ ID NO: 9360 - RNA, 38 nt, Artificial Sequence
  Description of Artificial Sequence:  Enzymatic Nucleic Acid
aaugcuuucugaugaggccguuaggccgaaacuucacg

SEQ ID NO: 9361 - RNA, 38 nt, Artificial Sequence
  Description of Artificial Sequence:  Enzymatic Nucleic Acid
guuuugcccugaugaggccguuaggccgaaaugcuuuu

SEQ ID NO: 9362 - RNA, 38 nt, Artificial Sequence
  Description of Artificial Sequence:  Enzymatic Nucleic Acid
acaugauccugaugaggccguuaggccgaaaguuuugc

SEQ ID NO: 9363 - RNA, 38 nt, Artificial Sequence
  Description of Artificial Sequence:  Enzymatic Nucleic Acid
auuuacaucugaugaggccguuaggccgaaaucaaguu

SEQ ID NO: 9364 - RNA, 38 nt, Artificial Sequence
  Description of Artificial Sequence:  Enzymatic Nucleic Acid
acaauauucugaugaggccguuaggccgaaacaugauc

SEQ ID NO: 9365 - RNA, 38 nt, Artificial Sequence
  Description of Artificial Sequence:  Enzymatic Nucleic Acid
gugaacaacugaugaggccguuaggccgaaauuuacau

SEQ ID NO: 9366 - RNA, 38 nt, Artificial Sequence
  Description of Artificial Sequence:  Enzymatic Nucleic Acid
uagugaaccugaugaggccguuaggccgaaauauuuac

SEQ ID NO: 9367 - RNA, 38 nt, Artificial Sequence
  Description of Artificial Sequence:  Enzymatic Nucleic Acid
uuguagugcugaugaggccguuaggccgaaacaauauu

SEQ ID NO: 9368 - RNA, 38 nt, Artificial Sequence
  Description of Artificial Sequence:  Enzymatic Nucleic Acid
auuguagucugaugaggccguuaggccgaaaacaauau

SEQ ID NO: 9369 - RNA, 38 nt, Artificial Sequence
  Description of Artificial Sequence:  Enzymatic Nucleic Acid
agccauugcugaugaggccguuaggccgaaagugaaca

SEQ ID NO: 9370 - RNA, 38 nt, Artificial Sequence
  Description of Artificial Sequence:  Enzymatic Nucleic Acid
uccauccccugaugaggccguuaggccgaaacagccau

SEQ ID NO: 9371 - RNA, 38 nt, Artificial Sequence
  Description of Artificial Sequence:  Enzymatic Nucleic Acid
cauaaucacugaugaggccguuaggccgaaauccaucc

SEQ ID NO: 9372 - RNA, 38 nt, Artificial Sequence
  Description of Artificial Sequence:  Enzymatic Nucleic Acid
ucauaauccugaugaggccguuaggccgaaaauccauc

SEQ ID NO: 9373 - RNA, 38 nt, Artificial Sequence
  Description of Artificial Sequence:  Enzymatic Nucleic Acid
aggaucaucugaugaggccguuaggccgaaaucaaauc

SEQ ID NO: 9374 - RNA, 38 nt, Artificial Sequence
  Description of Artificial Sequence:  Enzymatic Nucleic Acid
caggaucacugaugaggccguuaggccgaaaaucaaau

SEQ ID NO: 9375 - RNA, 38 nt, Artificial Sequence
  Description of Artificial Sequence:  Enzymatic Nucleic Acid
ggucucagcugaugaggccguuaggccgaaaucauaau

SEQ ID NO: 9376 - RNA, 38 nt, Artificial Sequence
  Description of Artificial Sequence:  Enzymatic Nucleic Acid
cucaagagcugaugaggccguuaggccgaaaucaucac

SEQ ID NO: 9377 - RNA, 38 nt, Artificial Sequence
  Description of Artificial Sequence:  Enzymatic Nucleic Acid
ucucaagacugaugaggccguuaggccgaaaaucauca

SEQ ID NO: 9378 - RNA, 38 nt, Artificial Sequence
  Description of Artificial Sequence:  Enzymatic Nucleic Acid
gcucucaacugaugaggccguuaggccgaaagaaucau

SEQ ID NO: 9379 - RNA, 38 nt, Artificial Sequence
  Description of Artificial Sequence:  Enzymatic Nucleic Acid
cugcucuccugaugaggccguuaggccgaaagagaauc

SEQ ID NO: 9380 - RNA, 38 nt, Artificial Sequence
  Description of Artificial Sequence:  Enzymatic Nucleic Acid
aggaucaucugaugaggccguuaggccgaaaucacugc

SEQ ID NO: 9381 - RNA, 38 nt, Artificial Sequence
  Description of Artificial Sequence:  Enzymatic Nucleic Acid
caggaucacugaugaggccguuaggccgaaaaucacug

SEQ ID NO: 9382 - RNA, 38 nt, Artificial Sequence
  Description of Artificial Sequence:  Enzymatic Nucleic Acid
guucucagcugaugaggccguuaggccgaaaucauaau

SEQ ID NO: 9383 - RNA, 38 nt, Artificial Sequence
  Description of Artificial Sequence:  Enzymatic Nucleic Acid
ccuugaaccugaugaggccguuaggccgaaauuuuugc

SEQ ID NO: 9384 - RNA, 38 nt, Artificial Sequence
  Description of Artificial Sequence:  Enzymatic Nucleic Acid
ugaccuugcugaugaggccguuaggccgaaacuauuuu

SEQ ID NO: 9385 - RNA, 38 nt, Artificial Sequence
  Description of Artificial Sequence:  Enzymatic Nucleic Acid
uugaccuucugaugaggccguuaggccgaaaacuauuu

SEQ ID NO: 9386 - RNA, 38 nt, Artificial Sequence
  Description of Artificial Sequence:  Enzymatic Nucleic Acid
uagucuuucugaugaggccguuaggccgaaaccuugaa

SEQ ID NO: 9387 - RNA, 38 nt, Artificial Sequence
  Description of Artificial Sequence:  Enzymatic Nucleic Acid
aaggcacucugaugaggccguuaggccgaaagucuuug

SEQ ID NO: 9388 - RNA, 38 nt, Artificial Sequence
  Description of Artificial Sequence:  Enzymatic Nucleic Acid
uggaugaacugaugaggccguuaggccgaaaggcacuu

SEQ ID NO: 9389 - RNA, 38 nt, Artificial Sequence
  Description of Artificial Sequence:  Enzymatic Nucleic Acid
uuggaugacugaugaggccguuaggccgaaaaggcacu

SEQ ID NO: 9390 - RNA, 38 nt, Artificial Sequence
  Description of Artificial Sequence:  Enzymatic Nucleic Acid
uuuggaugcugaugaggccguuaggccgaaaaaggcac

SEQ ID NO: 9391 - RNA, 38 nt, Artificial Sequence
  Description of Artificial Sequence:  Enzymatic Nucleic Acid
auuuggaucugaugaggccguuaggccgaaaaaaggca

SEQ ID NO: 9392 - RNA, 38 nt, Artificial Sequence
  Description of Artificial Sequence:  Enzymatic Nucleic Acid
uccauuugcugaugaggccguuaggccgaaaugaaaag

SEQ ID NO: 9393 - RNA, 38 nt, Artificial Sequence
  Description of Artificial Sequence:  Enzymatic Nucleic Acid
uaucacagcugaugaggccguuaggccgaaauuccauu

SEQ ID NO: 9394 - RNA, 38 nt, Artificial Sequence
  Description of Artificial Sequence:  Enzymatic Nucleic Acid
uuaucacacugaugaggccguuaggccgaaaauuccau

SEQ ID NO: 9395 - RNA, 38 nt, Artificial Sequence
  Description of Artificial Sequence:  Enzymatic Nucleic Acid
ggucccuucugaugaggccguuaggccgaaaucacaga

SEQ ID NO: 9396 - RNA, 38 nt, Artificial Sequence
  Description of Artificial Sequence:  Enzymatic Nucleic Acid
auuguucccugaugaggccguuaggccgaaaggucccu

SEQ ID NO: 9397 - RNA, 38 nt, Artificial Sequence
  Description of Artificial Sequence:  Enzymatic Nucleic Acid
cuuuuuuccugaugaggccguuaggccgaaauccauug

SEQ ID NO: 9398 - RNA, 38 nt, Artificial Sequence
  Description of Artificial Sequence:  Enzymatic Nucleic Acid
acuuuguccugaugaggccguuaggccgaaaguuucuc

SEQ ID NO: 9399 - RNA, 38 nt, Artificial Sequence
  Description of Artificial Sequence:  Enzymatic Nucleic Acid
aaagccaacugaugaggccguuaggccgaaacuuuguc

SEQ ID NO: 9400 - RNA, 38 nt, Artificial Sequence
  Description of Artificial Sequence:  Enzymatic Nucleic Acid
caaagccacugaugaggccguuaggccgaaaacuuugu

SEQ ID NO: 9401 - RNA, 38 nt, Artificial Sequence
  Description of Artificial Sequence:  Enzymatic Nucleic Acid
ccaaagcccugaugaggccguuaggccgaaaaacuuug

SEQ ID NO: 9402 - RNA, 38 nt, Artificial Sequence
  Description of Artificial Sequence:  Enzymatic Nucleic Acid
gaguuccacugaugaggccguuaggccgaaagccaaaa

SEQ ID NO: 9403 - RNA, 38 nt, Artificial Sequence
  Description of Artificial Sequence:  Enzymatic Nucleic Acid
agaguucccugaugaggccguuaggccgaaaagccaaa

SEQ ID NO: 9404 - RNA, 38 nt, Artificial Sequence
  Description of Artificial Sequence:  Enzymatic Nucleic Acid
uguucaaacugaugaggccguuaggccgaaaguuccaa

SEQ ID NO: 9405 - RNA, 38 nt, Artificial Sequence
  Description of Artificial Sequence:  Enzymatic Nucleic Acid
uuuguucacugaugaggccguuaggccgaaagaguucc

SEQ ID NO: 9406 - RNA, 38 nt, Artificial Sequence
  Description of Artificial Sequence:  Enzymatic Nucleic Acid
auuuguuccugaugaggccguuaggccgaaaagaguuc

SEQ ID NO: 9407 - RNA, 38 nt, Artificial Sequence
  Description of Artificial Sequence:  Enzymatic Nucleic Acid
ccuuuugucugaugaggccguuaggccgaaauuuguuc

SEQ ID NO: 9408 - RNA, 38 nt, Artificial Sequence
  Description of Artificial Sequence:  Enzymatic Nucleic Acid
auguauaucugaugaggccguuaggccgaaauccaccc

SEQ ID NO: 9409 - RNA, 38 nt, Artificial Sequence
  Description of Artificial Sequence:  Enzymatic Nucleic Acid
aauguauacugaugaggccguuaggccgaaaauccacc

SEQ ID NO: 9410 - RNA, 38 nt, Artificial Sequence
  Description of Artificial Sequence:  Enzymatic Nucleic Acid
ugaauguacugaugaggccguuaggccgaaauaaucca

SEQ ID NO: 9411 - RNA, 38 nt, Artificial Sequence
  Description of Artificial Sequence:  Enzymatic Nucleic Acid
uuugaaugcugaugaggccguuaggccgaaauauaauc

SEQ ID NO: 9412 - RNA, 38 nt, Artificial Sequence
  Description of Artificial Sequence:  Enzymatic Nucleic Acid
uuuuuuugcugaugaggccguuaggccgaaauguauau

SEQ ID NO: 9413 - RNA, 38 nt, Artificial Sequence
  Description of Artificial Sequence:  Enzymatic Nucleic Acid
auuuuuuucugaugaggccguuaggccgaaaauguaua

SEQ ID NO: 9414 - RNA, 38 nt, Artificial Sequence
  Description of Artificial Sequence:  Enzymatic Nucleic Acid
uaugaauucugaugaggccguuaggccgaaauuuuuuu

SEQ ID NO: 9415 - RNA, 38 nt, Artificial Sequence
  Description of Artificial Sequence:  Enzymatic Nucleic Acid
cuaugaaucugaugaggccguuaggccgaaaauuuuuu

SEQ ID NO: 9416 - RNA, 38 nt, Artificial Sequence
  Description of Artificial Sequence:  Enzymatic Nucleic Acid
ucucuaugcugaugaggccguuaggccgaaauuaauuu

SEQ ID NO: 9417 - RNA, 38 nt, Artificial Sequence
  Description of Artificial Sequence:  Enzymatic Nucleic Acid
aucucuaucugaugaggccguuaggccgaaaauuaauu

SEQ ID NO: 9418 - RNA, 38 nt, Artificial Sequence
  Description of Artificial Sequence:  Enzymatic Nucleic Acid
aagaucuccugaugaggccguuaggccgaaaugaauua

SEQ ID NO: 9419 - RNA, 38 nt, Artificial Sequence
  Description of Artificial Sequence:  Enzymatic Nucleic Acid
uggcuuaacugaugaggccguuaggccgaaaucucuau

SEQ ID NO: 9420 - RNA, 38 nt, Artificial Sequence
  Description of Artificial Sequence:  Enzymatic Nucleic Acid
cuuggcuucugaugaggccguuaggccgaaagaucucu

SEQ ID NO: 9421 - RNA, 38 nt, Artificial Sequence
  Description of Artificial Sequence:  Enzymatic Nucleic Acid
acuuggcucugaugaggccguuaggccgaaaagaucuc

SEQ ID NO: 9422 - RNA, 38 nt, Artificial Sequence
  Description of Artificial Sequence:  Enzymatic Nucleic Acid
gaauauaucugaugaggccguuaggccgaaacuuggcu

SEQ ID NO: 9423 - RNA, 38 nt, Artificial Sequence
  Description of Artificial Sequence:  Enzymatic Nucleic Acid
uaagaauacugaugaggccguuaggccgaaauuacuug

SEQ ID NO: 9424 - RNA, 38 nt, Artificial Sequence
  Description of Artificial Sequence:  Enzymatic Nucleic Acid
acuaagaacugaugaggccguuaggccgaaauauuacu

SEQ ID NO: 9425 - RNA, 38 nt, Artificial Sequence
  Description of Artificial Sequence:  Enzymatic Nucleic Acid
cuacuaagcugaugaggccguuaggccgaaauauauua

SEQ ID NO: 9426 - RNA, 38 nt, Artificial Sequence
  Description of Artificial Sequence:  Enzymatic Nucleic Acid
ucuacuaacugaugaggccguuaggccgaaaauauauu

SEQ ID NO: 9427 - RNA, 38 nt, Artificial Sequence
  Description of Artificial Sequence:  Enzymatic Nucleic Acid
uaucuacucugaugaggccguuaggccgaaagaauaua

SEQ ID NO: 9428 - RNA, 38 nt, Artificial Sequence
  Description of Artificial Sequence:  Enzymatic Nucleic Acid
guaucuaccugaugaggccguuaggccgaaaagaauau

SEQ ID NO: 9429 - RNA, 38 nt, Artificial Sequence
  Description of Artificial Sequence:  Enzymatic Nucleic Acid
uuuguauccugaugaggccguuaggccgaaacuaagaa

SEQ ID NO: 9430 - RNA, 38 nt, Artificial Sequence
  Description of Artificial Sequence:  Enzymatic Nucleic Acid
uuguuuugcugaugaggccguuaggccgaaaucuacua

SEQ ID NO: 9431 - RNA, 38 nt, Artificial Sequence
  Description of Artificial Sequence:  Enzymatic Nucleic Acid
ccaaucuucugaugaggccguuaggccgaaacuuguuu

SEQ ID NO: 9432 - RNA, 38 nt, Artificial Sequence
  Description of Artificial Sequence:  Enzymatic Nucleic Acid
aagucucccugaugaggccguuaggccgaaaucuuuac

SEQ ID NO: 9433 - RNA, 38 nt, Artificial Sequence
  Description of Artificial Sequence:  Enzymatic Nucleic Acid
caaguccacugaugaggccguuaggccgaaagucucca

SEQ ID NO: 9434 - RNA, 38 nt, Artificial Sequence
  Description of Artificial Sequence:  Enzymatic Nucleic Acid
acaagucccugaugaggccguuaggccgaaaagucucc

SEQ ID NO: 9435 - RNA, 38 nt, Artificial Sequence
  Description of Artificial Sequence:  Enzymatic Nucleic Acid
gauguuaccugaugaggccguuaggccgaaaguccaaa

SEQ ID NO: 9436 - RNA, 38 nt, Artificial Sequence
  Description of Artificial Sequence:  Enzymatic Nucleic Acid
agagaugucugaugaggccguuaggccgaaacaagucc

SEQ ID NO: 9437 - RNA, 38 nt, Artificial Sequence
  Description of Artificial Sequence:  Enzymatic Nucleic Acid
uuuucagacugaugaggccguuaggccgaaauguuaca

SEQ ID NO: 9438 - RNA, 38 nt, Artificial Sequence
  Description of Artificial Sequence:  Enzymatic Nucleic Acid
auuuuucacugaugaggccguuaggccgaaagauguua

SEQ ID NO: 9439 - RNA, 38 nt, Artificial Sequence
  Description of Artificial Sequence:  Enzymatic Nucleic Acid
aguucccucugaugaggccguuaggccgaaacuccuug

SEQ ID NO: 9440 - RNA, 38 nt, Artificial Sequence
  Description of Artificial Sequence:  Enzymatic Nucleic Acid
guaucgcacugaugaggccguuaggccgaaaguucccu

SEQ ID NO: 9441 - RNA, 38 nt, Artificial Sequence
  Description of Artificial Sequence:  Enzymatic Nucleic Acid
uguaucgccugaugaggccguuaggccgaaaaguuccc

SEQ ID NO: 9442 - RNA, 38 nt, Artificial Sequence
  Description of Artificial Sequence:  Enzymatic Nucleic Acid
ggcucaugcugaugaggccguuaggccgaaaucgcaaa

SEQ ID NO: 9443 - RNA, 38 nt, Artificial Sequence
  Description of Artificial Sequence:  Enzymatic Nucleic Acid
ugcgaagacugaugaggccguuaggccgaaaucuguuc

SEQ ID NO: 9444 - RNA, 38 nt, Artificial Sequence
  Description of Artificial Sequence:  Enzymatic Nucleic Acid
uugcgaagcugaugaggccguuaggccgaaaaucuguu

SEQ ID NO: 9445 - RNA, 38 nt, Artificial Sequence
  Description of Artificial Sequence:  Enzymatic Nucleic Acid
cuugcgaacugaugaggccguuaggccgaaaaaucugu

SEQ ID NO: 9446 - RNA, 38 nt, Artificial Sequence
  Description of Artificial Sequence:  Enzymatic Nucleic Acid
gucuugcgcugaugaggccguuaggccgaaagaaaucu

SEQ ID NO: 9447 - RNA, 38 nt, Artificial Sequence
  Description of Artificial Sequence:  Enzymatic Nucleic Acid
agucuugccugaugaggccguuaggccgaaaagaaauc

SEQ ID NO: 9448 - RNA, 38 nt, Artificial Sequence
  Description of Artificial Sequence:  Enzymatic Nucleic Acid
ccuuuccacugaugaggccguuaggccgaaagucuugc

SEQ ID NO: 9449 - RNA, 38 nt, Artificial Sequence
  Description of Artificial Sequence:  Enzymatic Nucleic Acid
aaagcguacugaugaggccguuaggccgaaagguccac

SEQ ID NO: 9450 - RNA, 38 nt, Artificial Sequence
  Description of Artificial Sequence:  Enzymatic Nucleic Acid
ccaaagcgcugaugaggccguuaggccgaaagaggucc

SEQ ID NO: 9451 - RNA, 38 nt, Artificial Sequence
  Description of Artificial Sequence:  Enzymatic Nucleic Acid
uagccccacugaugaggccguuaggccgaaagcguaga

SEQ ID NO: 9452 - RNA, 38 nt, Artificial Sequence
  Description of Artificial Sequence:  Enzymatic Nucleic Acid
uuagcccccugaugaggccguuaggccgaaaagcguag

SEQ ID NO: 9453 - RNA, 38 nt, Artificial Sequence
  Description of Artificial Sequence:  Enzymatic Nucleic Acid
gcaagaaucugaugaggccguuaggccgaaagccccaa

SEQ ID NO: 9454 - RNA, 38 nt, Artificial Sequence
  Description of Artificial Sequence:  Enzymatic Nucleic Acid
ucagcaagcugaugaggccguuaggccgaaauuagccc

SEQ ID NO: 9455 - RNA, 38 nt, Artificial Sequence
  Description of Artificial Sequence:  Enzymatic Nucleic Acid
uucagcaacugaugaggccguuaggccgaaaauuagcc

SEQ ID NO: 9456 - RNA, 38 nt, Artificial Sequence
  Description of Artificial Sequence:  Enzymatic Nucleic Acid
aguucagccugaugaggccguuaggccgaaagaauuag

SEQ ID NO: 9457 - RNA, 38 nt, Artificial Sequence
  Description of Artificial Sequence:  Enzymatic Nucleic Acid
acaugaagcugaugaggccguuaggccgaaaguucagc

SEQ ID NO: 9458 - RNA, 38 nt, Artificial Sequence
  Description of Artificial Sequence:  Enzymatic Nucleic Acid
uacaugaacugaugaggccguuaggccgaaaaguucag

SEQ ID NO: 9459 - RNA, 38 nt, Artificial Sequence
  Description of Artificial Sequence:  Enzymatic Nucleic Acid
cauacaugcugaugaggccguuaggccgaaagaaguuc

SEQ ID NO: 9460 - RNA, 38 nt, Artificial Sequence
  Description of Artificial Sequence:  Enzymatic Nucleic Acid
acauacaucugaugaggccguuaggccgaaaagaaguu

SEQ ID NO: 9461 - RNA, 38 nt, Artificial Sequence
  Description of Artificial Sequence:  Enzymatic Nucleic Acid
gugucacacugaugaggccguuaggccgaaacaugaag

SEQ ID NO: 9462 - RNA, 38 nt, Artificial Sequence
  Description of Artificial Sequence:  Enzymatic Nucleic Acid
uguuucaacugaugaggccguuaggccgaaagcagugu

SEQ ID NO: 9463 - RNA, 38 nt, Artificial Sequence
  Description of Artificial Sequence:  Enzymatic Nucleic Acid
auguuucacugaugaggccguuaggccgaaaagcagug

SEQ ID NO: 9464 - RNA, 38 nt, Artificial Sequence
  Description of Artificial Sequence:  Enzymatic Nucleic Acid
gauguuuccugaugaggccguuaggccgaaaaagcagu

SEQ ID NO: 9465 - RNA, 38 nt, Artificial Sequence
  Description of Artificial Sequence:  Enzymatic Nucleic Acid
aaaacuuucugaugaggccguuaggccgaaauguuuca

SEQ ID NO: 9466 - RNA, 38 nt, Artificial Sequence
  Description of Artificial Sequence:  Enzymatic Nucleic Acid
cugugaaacugaugaggccguuaggccgaaacuuugau

SEQ ID NO: 9467 - RNA, 38 nt, Artificial Sequence
  Description of Artificial Sequence:  Enzymatic Nucleic Acid
ucugugaacugaugaggccguuaggccgaaaacuuuga

SEQ ID NO: 9468 - RNA, 38 nt, Artificial Sequence
  Description of Artificial Sequence:  Enzymatic Nucleic Acid
gucugugacugaugaggccguuaggccgaaaaacuuug

SEQ ID NO: 9469 - RNA, 38 nt, Artificial Sequence
  Description of Artificial Sequence:  Enzymatic Nucleic Acid
ggucugugcugaugaggccguuaggccgaaaaaacuuu

SEQ ID NO: 9470 - RNA, 38 nt, Artificial Sequence
  Description of Artificial Sequence:  Enzymatic Nucleic Acid
aggucugucugaugaggccguuaggccgaaaaaaacuu

SEQ ID NO: 9471 - RNA, 38 nt, Artificial Sequence
  Description of Artificial Sequence:  Enzymatic Nucleic Acid
ccaucccgcugaugaggccguuaggccgaaaggucugu

SEQ ID NO: 9472 - RNA, 38 nt, Artificial Sequence
  Description of Artificial Sequence:  Enzymatic Nucleic Acid
ucugagaucugaugaggccguuaggccgaaaugccauc

SEQ ID NO: 9473 - RNA, 38 nt, Artificial Sequence
  Description of Artificial Sequence:  Enzymatic Nucleic Acid
auaucugacugaugaggccguuaggccgaaaugaugcc

SEQ ID NO: 9474 - RNA, 38 nt, Artificial Sequence
  Description of Artificial Sequence:  Enzymatic Nucleic Acid
auauaucucugaugaggccguuaggccgaaagaugaug

SEQ ID NO: 9475 - RNA, 38 nt, Artificial Sequence
  Description of Artificial Sequence:  Enzymatic Nucleic Acid
aucaaauacugaugaggccguuaggccgaaaucugaga

SEQ ID NO: 9476 - RNA, 38 nt, Artificial Sequence
  Description of Artificial Sequence:  Enzymatic Nucleic Acid
uuaucaaacugaugaggccguuaggccgaaauaucuga

SEQ ID NO: 9477 - RNA, 38 nt, Artificial Sequence
  Description of Artificial Sequence:  Enzymatic Nucleic Acid
uuuuaucacugaugaggccguuaggccgaaauauaucu

SEQ ID NO: 9478 - RNA, 38 nt, Artificial Sequence
  Description of Artificial Sequence:  Enzymatic Nucleic Acid
uuuuuauccugaugaggccguuaggccgaaaauauauc

SEQ ID NO: 9479 - RNA, 38 nt, Artificial Sequence
  Description of Artificial Sequence:  Enzymatic Nucleic Acid
uucuuuuucugaugaggccguuaggccgaaaucaaaua

SEQ ID NO: 9480 - RNA, 38 nt, Artificial Sequence
  Description of Artificial Sequence:  Enzymatic Nucleic Acid
cuguagaacugaugaggccguuaggccgaaaguuuuuu

SEQ ID NO: 9481 - RNA, 38 nt, Artificial Sequence
  Description of Artificial Sequence:  Enzymatic Nucleic Acid
uucuguagcugaugaggccguuaggccgaaagaguuuu

SEQ ID NO: 9482 - RNA, 38 nt, Artificial Sequence
  Description of Artificial Sequence:  Enzymatic Nucleic Acid
uuucuguacugaugaggccguuaggccgaaaagaguuu

SEQ ID NO: 9483 - RNA, 38 nt, Artificial Sequence
  Description of Artificial Sequence:  Enzymatic Nucleic Acid
aauuucugcugaugaggccguuaggccgaaagaagagu

SEQ ID NO: 9484 - RNA, 38 nt, Artificial Sequence
  Description of Artificial Sequence:  Enzymatic Nucleic Acid
uugagagucugaugaggccguuaggccgaaauuucugu

SEQ ID NO: 9485 - RNA, 38 nt, Artificial Sequence
  Description of Artificial Sequence:  Enzymatic Nucleic Acid
uuugagagcugaugaggccguuaggccgaaaauuucug

SEQ ID NO: 9486 - RNA, 38 nt, Artificial Sequence
  Description of Artificial Sequence:  Enzymatic Nucleic Acid
uucuuugacugaugaggccguuaggccgaaaguaauuu

SEQ ID NO: 9487 - RNA, 38 nt, Artificial Sequence
  Description of Artificial Sequence:  Enzymatic Nucleic Acid
guuucuuucugaugaggccguuaggccgaaagaguaau

SEQ ID NO: 9488 - RNA, 38 nt, Artificial Sequence
  Description of Artificial Sequence:  Enzymatic Nucleic Acid
guuagguccugaugaggccguuaggccgaaauccucag

SEQ ID NO: 9489 - RNA, 38 nt, Artificial Sequence
  Description of Artificial Sequence:  Enzymatic Nucleic Acid
agaugugucugaugaggccguuaggccgaaaggucgau

SEQ ID NO: 9490 - RNA, 38 nt, Artificial Sequence
  Description of Artificial Sequence:  Enzymatic Nucleic Acid
guauuucacugaugaggccguuaggccgaaauguguua

SEQ ID NO: 9491 - RNA, 38 nt, Artificial Sequence
  Description of Artificial Sequence:  Enzymatic Nucleic Acid
guccuuagcugaugaggccguuaggccgaaauuucaga

SEQ ID NO: 9492 - RNA, 38 nt, Artificial Sequence
  Description of Artificial Sequence:  Enzymatic Nucleic Acid
aagguccucugaugaggccguuaggccgaaaguauuuc

SEQ ID NO: 9493 - RNA, 38 nt, Artificial Sequence
  Description of Artificial Sequence:  Enzymatic Nucleic Acid
acacaguccugaugaggccguuaggccgaaagguccuu

SEQ ID NO: 9494 - RNA, 38 nt, Artificial Sequence
  Description of Artificial Sequence:  Enzymatic Nucleic Acid
agggcucucugaugaggccguuaggccgaaacaugugu

SEQ ID NO: 9495 - RNA, 38 nt, Artificial Sequence
  Description of Artificial Sequence:  Enzymatic Nucleic Acid
aagggcuccugaugaggccguuaggccgaaaacaugug

SEQ ID NO: 9496 - RNA, 38 nt, Artificial Sequence
  Description of Artificial Sequence:  Enzymatic Nucleic Acid
uuuuucagcugaugaggccguuaggccgaaagggcucu

SEQ ID NO: 9497 - RNA, 38 nt, Artificial Sequence
  Description of Artificial Sequence:  Enzymatic Nucleic Acid
cuuuuucacugaugaggccguuaggccgaaaagggcuc

SEQ ID NO: 9498 - RNA, 38 nt, Artificial Sequence
  Description of Artificial Sequence:  Enzymatic Nucleic Acid
aagcaggacugaugaggccguuaggccgaaacuuuuuc

SEQ ID NO: 9499 - RNA, 38 nt, Artificial Sequence
  Description of Artificial Sequence:  Enzymatic Nucleic Acid
agaagcagcugaugaggccguuaggccgaaauacuuuu

SEQ ID NO: 9500 - RNA, 38 nt, Artificial Sequence
  Description of Artificial Sequence:  Enzymatic Nucleic Acid
cauaucagcugaugaggccguuaggccgaaagcaggau

SEQ ID NO: 9501 - RNA, 38 nt, Artificial Sequence
  Description of Artificial Sequence:  Enzymatic Nucleic Acid
gcauaucacugaugaggccguuaggccgaaaagcagga

SEQ ID NO: 9502 - RNA, 38 nt, Artificial Sequence
  Description of Artificial Sequence:  Enzymatic Nucleic Acid
aaacugcacugaugaggccguuaggccgaaaucagaag

SEQ ID NO: 9503 - RNA, 38 nt, Artificial Sequence
  Description of Artificial Sequence:  Enzymatic Nucleic Acid
uuaaggaacugaugaggccguuaggccgaaacugcaua

SEQ ID NO: 9504 - RNA, 38 nt, Artificial Sequence
  Description of Artificial Sequence:  Enzymatic Nucleic Acid
uuuaaggacugaugaggccguuaggccgaaaacugcau

SEQ ID NO: 9505 - RNA, 38 nt, Artificial Sequence
  Description of Artificial Sequence:  Enzymatic Nucleic Acid
auuuaaggcugaugaggccguuaggccgaaaaacugca

SEQ ID NO: 9506 - RNA, 38 nt, Artificial Sequence
  Description of Artificial Sequence:  Enzymatic Nucleic Acid
aauuuaagcugaugaggccguuaggccgaaaaaacugc

SEQ ID NO: 9507 - RNA, 38 nt, Artificial Sequence
  Description of Artificial Sequence:  Enzymatic Nucleic Acid
gauaauuucugaugaggccguuaggccgaaaggaaaac

SEQ ID NO: 9508 - RNA, 38 nt, Artificial Sequence
  Description of Artificial Sequence:  Enzymatic Nucleic Acid
agauaauucugaugaggccguuaggccgaaaaggaaaa

SEQ ID NO: 9509 - RNA, 38 nt, Artificial Sequence
  Description of Artificial Sequence:  Enzymatic Nucleic Acid
uuuuagaucugaugaggccguuaggccgaaauuuaagg

SEQ ID NO: 9510 - RNA, 38 nt, Artificial Sequence
  Description of Artificial Sequence:  Enzymatic Nucleic Acid
auuuuagacugaugaggccguuaggccgaaaauuuaag

SEQ ID NO: 9511 - RNA, 38 nt, Artificial Sequence
  Description of Artificial Sequence:  Enzymatic Nucleic Acid
agauuuuacugaugaggccguuaggccgaaauaauuua

SEQ ID NO: 9512 - RNA, 38 nt, Artificial Sequence
  Description of Artificial Sequence:  Enzymatic Nucleic Acid
gcagauuucugaugaggccguuaggccgaaagauaauu

SEQ ID NO: 9513 - RNA, 38 nt, Artificial Sequence
  Description of Artificial Sequence:  Enzymatic Nucleic Acid
cccuagcacugaugaggccguuaggccgaaauuuuaga

SEQ ID NO: 9514 - RNA, 38 nt, Artificial Sequence
  Description of Artificial Sequence:  Enzymatic Nucleic Acid
auauuccccugaugaggccguuaggccgaaagcagauu

SEQ ID NO: 9515 - RNA, 38 nt, Artificial Sequence
  Description of Artificial Sequence:  Enzymatic Nucleic Acid
ucuauugacugaugaggccguuaggccgaaauucccua

SEQ ID NO: 9516 - RNA, 38 nt, Artificial Sequence
  Description of Artificial Sequence:  Enzymatic Nucleic Acid
uaucuauucugaugaggccguuaggccgaaauauuccc

SEQ ID NO: 9517 - RNA, 38 nt, Artificial Sequence
  Description of Artificial Sequence:  Enzymatic Nucleic Acid
uaaauauccugaugaggccguuaggccgaaauugauau

SEQ ID NO: 9518 - RNA, 38 nt, Artificial Sequence
  Description of Artificial Sequence:  Enzymatic Nucleic Acid
aagguaaacugaugaggccguuaggccgaaaucuauug

SEQ ID NO: 9519 - RNA, 38 nt, Artificial Sequence
  Description of Artificial Sequence:  Enzymatic Nucleic Acid
aaaagguacugaugaggccguuaggccgaaauaucuau

SEQ ID NO: 9520 - RNA, 38 nt, Artificial Sequence
  Description of Artificial Sequence:  Enzymatic Nucleic Acid
uaaaaggucugaugaggccguuaggccgaaaauaucua

SEQ ID NO: 9521 - RNA, 38 nt, Artificial Sequence
  Description of Artificial Sequence:  Enzymatic Nucleic Acid
auaaaaggcugaugaggccguuaggccgaaaaauaucu

SEQ ID NO: 9522 - RNA, 38 nt, Artificial Sequence
  Description of Artificial Sequence:  Enzymatic Nucleic Acid
uaaaauaacugaugaggccguuaggccgaaagguaaau

SEQ ID NO: 9523 - RNA, 38 nt, Artificial Sequence
  Description of Artificial Sequence:  Enzymatic Nucleic Acid
uuaaaauacugaugaggccguuaggccgaaaagguaaa

SEQ ID NO: 9524 - RNA, 38 nt, Artificial Sequence
  Description of Artificial Sequence:  Enzymatic Nucleic Acid
auuaaaaucugaugaggccguuaggccgaaaaagguaa

SEQ ID NO: 9525 - RNA, 38 nt, Artificial Sequence
  Description of Artificial Sequence:  Enzymatic Nucleic Acid
cauuaaaacugaugaggccguuaggccgaaaaaaggua

SEQ ID NO: 9526 - RNA, 38 nt, Artificial Sequence
  Description of Artificial Sequence:  Enzymatic Nucleic Acid
aacauuaacugaugaggccguuaggccgaaauaaaagg

SEQ ID NO: 9527 - RNA, 38 nt, Artificial Sequence
  Description of Artificial Sequence:  Enzymatic Nucleic Acid
aaacauuacugaugaggccguuaggccgaaaauaaaag

SEQ ID NO: 9528 - RNA, 38 nt, Artificial Sequence
  Description of Artificial Sequence:  Enzymatic Nucleic Acid
gaaacauucugaugaggccguuaggccgaaaaauaaaa

SEQ ID NO: 9529 - RNA, 38 nt, Artificial Sequence
  Description of Artificial Sequence:  Enzymatic Nucleic Acid
ggaaacaucugaugaggccguuaggccgaaaaaauaaa

SEQ ID NO: 9530 - RNA, 38 nt, Artificial Sequence
  Description of Artificial Sequence:  Enzymatic Nucleic Acid
uuaaaggacugaugaggccguuaggccgaaacauuaaa

SEQ ID NO: 9531 - RNA, 38 nt, Artificial Sequence
  Description of Artificial Sequence:  Enzymatic Nucleic Acid
auuaaaggcugaugaggccguuaggccgaaaacauuaa

SEQ ID NO: 9532 - RNA, 38 nt, Artificial Sequence
  Description of Artificial Sequence:  Enzymatic Nucleic Acid
aauuaaagcugaugaggccguuaggccgaaaaacauua

SEQ ID NO: 9533 - RNA, 38 nt, Artificial Sequence
  Description of Artificial Sequence:  Enzymatic Nucleic Acid
aaaaauuacugaugaggccguuaggccgaaaggaaaca

SEQ ID NO: 9534 - RNA, 38 nt, Artificial Sequence
  Description of Artificial Sequence:  Enzymatic Nucleic Acid
aaaaaauucugaugaggccguuaggccgaaaaggaaac

SEQ ID NO: 9535 - RNA, 38 nt, Artificial Sequence
  Description of Artificial Sequence:  Enzymatic Nucleic Acid
uaaaaaaucugaugaggccguuaggccgaaaaaggaaa

SEQ ID NO: 9536 - RNA, 38 nt, Artificial Sequence
  Description of Artificial Sequence:  Enzymatic Nucleic Acid
uaguaaaacugaugaggccguuaggccgaaauuaaagg

SEQ ID NO: 9537 - RNA, 38 nt, Artificial Sequence
  Description of Artificial Sequence:  Enzymatic Nucleic Acid
auaguaaacugaugaggccguuaggccgaaaauuaaag

SEQ ID NO: 9538 - RNA, 38 nt, Artificial Sequence
  Description of Artificial Sequence:  Enzymatic Nucleic Acid
aauaguaacugaugaggccguuaggccgaaaaauuaaa

SEQ ID NO: 9539 - RNA, 38 nt, Artificial Sequence
  Description of Artificial Sequence:  Enzymatic Nucleic Acid
aaauaguacugaugaggccguuaggccgaaaaaauuaa

SEQ ID NO: 9540 - RNA, 38 nt, Artificial Sequence
  Description of Artificial Sequence:  Enzymatic Nucleic Acid
aaaauagucugaugaggccguuaggccgaaaaaaauua

SEQ ID NO: 9541 - RNA, 38 nt, Artificial Sequence
  Description of Artificial Sequence:  Enzymatic Nucleic Acid
aaaaauagcugaugaggccguuaggccgaaaaaaaauu

SEQ ID NO: 9542 - RNA, 38 nt, Artificial Sequence
  Description of Artificial Sequence:  Enzymatic Nucleic Acid
aguaaaaacugaugaggccguuaggccgaaaguaaaaa

SEQ ID NO: 9543 - RNA, 38 nt, Artificial Sequence
  Description of Artificial Sequence:  Enzymatic Nucleic Acid
uuaguaaacugaugaggccguuaggccgaaauaguaaa

SEQ ID NO: 9544 - RNA, 38 nt, Artificial Sequence
  Description of Artificial Sequence:  Enzymatic Nucleic Acid
auuaguaacugaugaggccguuaggccgaaaauaguaa

SEQ ID NO: 9545 - RNA, 38 nt, Artificial Sequence
  Description of Artificial Sequence:  Enzymatic Nucleic Acid
gauuaguacugaugaggccguuaggccgaaaaauagua

SEQ ID NO: 9546 - RNA, 38 nt, Artificial Sequence
  Description of Artificial Sequence:  Enzymatic Nucleic Acid
agauuagucugaugaggccguuaggccgaaaaaauagu

SEQ ID NO: 9547 - RNA, 38 nt, Artificial Sequence
  Description of Artificial Sequence:  Enzymatic Nucleic Acid
aagauuagcugaugaggccguuaggccgaaaaaaauag

SEQ ID NO: 9548 - RNA, 38 nt, Artificial Sequence
  Description of Artificial Sequence:  Enzymatic Nucleic Acid
agaaagaucugaugaggccguuaggccgaaaguaaaaa

SEQ ID NO: 9549 - RNA, 38 nt, Artificial Sequence
  Description of Artificial Sequence:  Enzymatic Nucleic Acid
ugcagaaacugaugaggccguuaggccgaaauuaguaa

SEQ ID NO: 9550 - RNA, 38 nt, Artificial Sequence
  Description of Artificial Sequence:  Enzymatic Nucleic Acid
ucugcagacugaugaggccguuaggccgaaagauuagu

SEQ ID NO: 9551 - RNA, 38 nt, Artificial Sequence
  Description of Artificial Sequence:  Enzymatic Nucleic Acid
uucugcagcugaugaggccguuaggccgaaaagauuag

SEQ ID NO: 9552 - RNA, 38 nt, Artificial Sequence
  Description of Artificial Sequence:  Enzymatic Nucleic Acid
uuucugcacugaugaggccguuaggccgaaaaagauua

SEQ ID NO: 9553 - RNA, 38 nt, Artificial Sequence
  Description of Artificial Sequence:  Enzymatic Nucleic Acid
aagaagaacugaugaggccguuaggccgaaaccuuucu

SEQ ID NO: 9554 - RNA, 38 nt, Artificial Sequence
  Description of Artificial Sequence:  Enzymatic Nucleic Acid
aaagaagacugaugaggccguuaggccgaaaaccuuuc

SEQ ID NO: 9555 - RNA, 38 nt, Artificial Sequence
  Description of Artificial Sequence:  Enzymatic Nucleic Acid
aaaagaagcugaugaggccguuaggccgaaaaaccuuu

SEQ ID NO: 9556 - RNA, 38 nt, Artificial Sequence
  Description of Artificial Sequence:  Enzymatic Nucleic Acid
aaaaagaacugaugaggccguuaggccgaaaaaaccuu

SEQ ID NO: 9557 - RNA, 38 nt, Artificial Sequence
  Description of Artificial Sequence:  Enzymatic Nucleic Acid
gcaaaaagcugaugaggccguuaggccgaaagaaaacc

SEQ ID NO: 9558 - RNA, 38 nt, Artificial Sequence
  Description of Artificial Sequence:  Enzymatic Nucleic Acid
agcaaaaacugaugaggccguuaggccgaaaagaaaac

SEQ ID NO: 9559 - RNA, 38 nt, Artificial Sequence
  Description of Artificial Sequence:  Enzymatic Nucleic Acid
gaagcaaacugaugaggccguuaggccgaaagaagaaa

SEQ ID NO: 9560 - RNA, 38 nt, Artificial Sequence
  Description of Artificial Sequence:  Enzymatic Nucleic Acid
ugaagcaacugaugaggccguuaggccgaaaagaagaa

SEQ ID NO: 9561 - RNA, 38 nt, Artificial Sequence
  Description of Artificial Sequence:  Enzymatic Nucleic Acid
uugaagcacugaugaggccguuaggccgaaaaagaaga

SEQ ID NO: 9562 - RNA, 38 nt, Artificial Sequence
  Description of Artificial Sequence:  Enzymatic Nucleic Acid
uuugaagccugaugaggccguuaggccgaaaaaagaag

SEQ ID NO: 9563 - RNA, 38 nt, Artificial Sequence
  Description of Artificial Sequence:  Enzymatic Nucleic Acid
uguuuuugcugaugaggccguuaggccgaaagcaaaaa

SEQ ID NO: 9564 - RNA, 38 nt, Artificial Sequence
  Description of Artificial Sequence:  Enzymatic Nucleic Acid
auguuuuucugaugaggccguuaggccgaaaagcaaaa

SEQ ID NO: 9565 - RNA, 38 nt, Artificial Sequence
  Description of Artificial Sequence:  Enzymatic Nucleic Acid
aauguaagcugaugaggccguuaggccgaaauguuuuu

SEQ ID NO: 9566 - RNA, 38 nt, Artificial Sequence
  Description of Artificial Sequence:  Enzymatic Nucleic Acid
aaauguaacugaugaggccguuaggccgaaaauguuuu

SEQ ID NO: 9567 - RNA, 38 nt, Artificial Sequence
  Description of Artificial Sequence:  Enzymatic Nucleic Acid
uaaaaugucugaugaggccguuaggccgaaagaauguu

SEQ ID NO: 9568 - RNA, 38 nt, Artificial Sequence
  Description of Artificial Sequence:  Enzymatic Nucleic Acid
guaaaaugcugaugaggccguuaggccgaaaagaaugu

SEQ ID NO: 9569 - RNA, 38 nt, Artificial Sequence
  Description of Artificial Sequence:  Enzymatic Nucleic Acid
aaaaguaacugaugaggccguuaggccgaaauguaaga

SEQ ID NO: 9570 - RNA, 38 nt, Artificial Sequence
  Description of Artificial Sequence:  Enzymatic Nucleic Acid
aaaaaguacugaugaggccguuaggccgaaaauguaag

SEQ ID NO: 9571 - RNA, 38 nt, Artificial Sequence
  Description of Artificial Sequence:  Enzymatic Nucleic Acid
gaaaaagucugaugaggccguuaggccgaaaaauguaa

SEQ ID NO: 9572 - RNA, 38 nt, Artificial Sequence
  Description of Artificial Sequence:  Enzymatic Nucleic Acid
ggaaaaagcugaugaggccguuaggccgaaaaaaugua

SEQ ID NO: 9573 - RNA, 38 nt, Artificial Sequence
  Description of Artificial Sequence:  Enzymatic Nucleic Acid
ccaggaaacugaugaggccguuaggccgaaaguaaaau

SEQ ID NO: 9574 - RNA, 38 nt, Artificial Sequence
  Description of Artificial Sequence:  Enzymatic Nucleic Acid
gccaggaacugaugaggccguuaggccgaaaaguaaaa

SEQ ID NO: 9575 - RNA, 38 nt, Artificial Sequence
  Description of Artificial Sequence:  Enzymatic Nucleic Acid
agccaggacugaugaggccguuaggccgaaaaaguaaa

SEQ ID NO: 9576 - RNA, 38 nt, Artificial Sequence
  Description of Artificial Sequence:  Enzymatic Nucleic Acid
gagccaggcugaugaggccguuaggccgaaaaaaguaa

SEQ ID NO: 9577 - RNA, 38 nt, Artificial Sequence
  Description of Artificial Sequence:  Enzymatic Nucleic Acid
ugagccagcugaugaggccguuaggccgaaaaaaagua

SEQ ID NO: 9578 - RNA, 38 nt, Artificial Sequence
  Description of Artificial Sequence:  Enzymatic Nucleic Acid
aaagagaucugaugaggccguuaggccgaaagccagga

SEQ ID NO: 9579 - RNA, 38 nt, Artificial Sequence
  Description of Artificial Sequence:  Enzymatic Nucleic Acid
aauaaagacugaugaggccguuaggccgaaaugagcca

SEQ ID NO: 9580 - RNA, 38 nt, Artificial Sequence
  Description of Artificial Sequence:  Enzymatic Nucleic Acid
agaauaaacugaugaggccguuaggccgaaagaugagc

SEQ ID NO: 9581 - RNA, 38 nt, Artificial Sequence
  Description of Artificial Sequence:  Enzymatic Nucleic Acid
aaagaauacugaugaggccguuaggccgaaagagauga

SEQ ID NO: 9582 - RNA, 38 nt, Artificial Sequence
  Description of Artificial Sequence:  Enzymatic Nucleic Acid
aaaagaaucugaugaggccguuaggccgaaaagagaug

SEQ ID NO: 9583 - RNA, 38 nt, Artificial Sequence
  Description of Artificial Sequence:  Enzymatic Nucleic Acid
aaaaagaacugaugaggccguuaggccgaaaaagagau

SEQ ID NO: 9584 - RNA, 38 nt, Artificial Sequence
  Description of Artificial Sequence:  Enzymatic Nucleic Acid
aaaaaaagcugaugaggccguuaggccgaaauaaagag

SEQ ID NO: 9585 - RNA, 38 nt, Artificial Sequence
  Description of Artificial Sequence:  Enzymatic Nucleic Acid
aaaaaaaacugaugaggccguuaggccgaaaauaaaga

SEQ ID NO: 9586 - RNA, 38 nt, Artificial Sequence
  Description of Artificial Sequence:  Enzymatic Nucleic Acid
aaaaaaaacugaugaggccguuaggccgaaagaauaaa

SEQ ID NO: 9587 - RNA, 38 nt, Artificial Sequence
  Description of Artificial Sequence:  Enzymatic Nucleic Acid
aaaaaaaacugaugaggccguuaggccgaaaagaauaa

SEQ ID NO: 9588 - RNA, 38 nt, Artificial Sequence
  Description of Artificial Sequence:  Enzymatic Nucleic Acid
aaaaaaaacugaugaggccguuaggccgaaaaagaaua

SEQ ID NO: 9589 - RNA, 38 nt, Artificial Sequence
  Description of Artificial Sequence:  Enzymatic Nucleic Acid
aaaaaaaacugaugaggccguuaggccgaaaaaagaau

SEQ ID NO: 9590 - RNA, 38 nt, Artificial Sequence
  Description of Artificial Sequence:  Enzymatic Nucleic Acid
aaaaaaaacugaugaggccguuaggccgaaaaaaagaa

SEQ ID NO: 9591 - RNA, 38 nt, Artificial Sequence
  Description of Artificial Sequence:  Enzymatic Nucleic Acid
uaaaaaaacugaugaggccguuaggccgaaaaaaaaga

SEQ ID NO: 9592 - RNA, 38 nt, Artificial Sequence
  Description of Artificial Sequence:  Enzymatic Nucleic Acid
uuaaaaaacugaugaggccguuaggccgaaaaaaaaag

SEQ ID NO: 9593 - RNA, 38 nt, Artificial Sequence
  Description of Artificial Sequence:  Enzymatic Nucleic Acid
uuuaaaaacugaugaggccguuaggccgaaaaaaaaaa

SEQ ID NO: 9594 - RNA, 38 nt, Artificial Sequence
  Description of Artificial Sequence:  Enzymatic Nucleic Acid
cuuuaaaacugaugaggccguuaggccgaaaaaaaaaa

SEQ ID NO: 9595 - RNA, 38 nt, Artificial Sequence
  Description of Artificial Sequence:  Enzymatic Nucleic Acid
ucuuuaaacugaugaggccguuaggccgaaaaaaaaaa

SEQ ID NO: 9596 - RNA, 38 nt, Artificial Sequence
  Description of Artificial Sequence:  Enzymatic Nucleic Acid
gucuuuaacugaugaggccguuaggccgaaaaaaaaaa

SEQ ID NO: 9597 - RNA, 38 nt, Artificial Sequence
  Description of Artificial Sequence:  Enzymatic Nucleic Acid
ugucuuuacugaugaggccguuaggccgaaaaaaaaaa

SEQ ID NO: 9598 - RNA, 38 nt, Artificial Sequence
  Description of Artificial Sequence:  Enzymatic Nucleic Acid
cugucuuucugaugaggccguuaggccgaaaaaaaaaa

SEQ ID NO: 9599 - RNA, 38 nt, Artificial Sequence
  Description of Artificial Sequence:  Enzymatic Nucleic Acid
ucugucuucugaugaggccguuaggccgaaaaaaaaaa

SEQ ID NO: 9600 - RNA, 38 nt, Artificial Sequence
  Description of Artificial Sequence:  Enzymatic Nucleic Acid
cagagcgacugaugaggccguuaggccgaaacucuguc

SEQ ID NO: 9601 - RNA, 38 nt, Artificial Sequence
  Description of Artificial Sequence:  Enzymatic Nucleic Acid
aacagagccugaugaggccguuaggccgaaagacucug

SEQ ID NO: 9602 - RNA, 38 nt, Artificial Sequence
  Description of Artificial Sequence:  Enzymatic Nucleic Acid
gggcaacacugaugaggccguuaggccgaaagcgagac

SEQ ID NO: 9603 - RNA, 38 nt, Artificial Sequence
  Description of Artificial Sequence:  Enzymatic Nucleic Acid
gccugggccugaugaggccguuaggccgaaacagagcg

SEQ ID NO: 9604 - RNA, 38 nt, Artificial Sequence
  Description of Artificial Sequence:  Enzymatic Nucleic Acid
ugagccaacugaugaggccguuaggccgaaacuguguc

SEQ ID NO: 9605 - RNA, 38 nt, Artificial Sequence
  Description of Artificial Sequence:  Enzymatic Nucleic Acid
agugagcccugaugaggccguuaggccgaaagacugug

SEQ ID NO: 9606 - RNA, 38 nt, Artificial Sequence
  Description of Artificial Sequence:  Enzymatic Nucleic Acid
guugcagucugaugaggccguuaggccgaaagccaaga

SEQ ID NO: 9607 - RNA, 38 nt, Artificial Sequence
  Description of Artificial Sequence:  Enzymatic Nucleic Acid
agaggcagcugaugaggccguuaggccgaaaguugcag

SEQ ID NO: 9608 - RNA, 38 nt, Artificial Sequence
  Description of Artificial Sequence:  Enzymatic Nucleic Acid
aagaggcacugaugaggccguuaggccgaaaaguugca

SEQ ID NO: 9609 - RNA, 38 nt, Artificial Sequence
  Description of Artificial Sequence:  Enzymatic Nucleic Acid
gaacccaacugaugaggccguuaggccgaaaggcagaa

SEQ ID NO: 9610 - RNA, 38 nt, Artificial Sequence
  Description of Artificial Sequence:  Enzymatic Nucleic Acid
uugaaccccugaugaggccguuaggccgaaagaggcag

SEQ ID NO: 9611 - RNA, 38 nt, Artificial Sequence
  Description of Artificial Sequence:  Enzymatic Nucleic Acid
aucacuugcugaugaggccguuaggccgaaacccaaga

SEQ ID NO: 9612 - RNA, 38 nt, Artificial Sequence
  Description of Artificial Sequence:  Enzymatic Nucleic Acid
aaucacuucugaugaggccguuaggccgaaaacccaag

SEQ ID NO: 9613 - RNA, 38 nt, Artificial Sequence
  Description of Artificial Sequence:  Enzymatic Nucleic Acid
ggcaggagcugaugaggccguuaggccgaaaucacuug

SEQ ID NO: 9614 - RNA, 38 nt, Artificial Sequence
  Description of Artificial Sequence:  Enzymatic Nucleic Acid
aggcaggacugaugaggccguuaggccgaaaaucacuu

SEQ ID NO: 9615 - RNA, 38 nt, Artificial Sequence
  Description of Artificial Sequence:  Enzymatic Nucleic Acid
ugaggcagcugaugaggccguuaggccgaaagaaucac

SEQ ID NO: 9616 - RNA, 38 nt, Artificial Sequence
  Description of Artificial Sequence:  Enzymatic Nucleic Acid
aggaggcucugaugaggccguuaggccgaaaggcagga

SEQ ID NO: 9617 - RNA, 38 nt, Artificial Sequence
  Description of Artificial Sequence:  Enzymatic Nucleic Acid
cuacucagcugaugaggccguuaggccgaaaggcugag

SEQ ID NO: 9618 - RNA, 38 nt, Artificial Sequence
  Description of Artificial Sequence:  Enzymatic Nucleic Acid
aauccagccugaugaggccguuaggccgaaacucagga

SEQ ID NO: 9619 - RNA, 38 nt, Artificial Sequence
  Description of Artificial Sequence:  Enzymatic Nucleic Acid
augccugucugaugaggccguuaggccgaaauccagcu

SEQ ID NO: 9620 - RNA, 38 nt, Artificial Sequence
  Description of Artificial Sequence:  Enzymatic Nucleic Acid
caugccugcugaugaggccguuaggccgaaaauccagc

SEQ ID NO: 9621 - RNA, 38 nt, Artificial Sequence
  Description of Artificial Sequence:  Enzymatic Nucleic Acid
acaaaaaucugaugaggccguuaggccgaaaguugggu

SEQ ID NO: 9622 - RNA, 38 nt, Artificial Sequence
  Description of Artificial Sequence:  Enzymatic Nucleic Acid
aacacaaacugaugaggccguuaggccgaaauuaguug

SEQ ID NO: 9623 - RNA, 38 nt, Artificial Sequence
  Description of Artificial Sequence:  Enzymatic Nucleic Acid
aaacacaacugaugaggccguuaggccgaaaauuaguu

SEQ ID NO: 9624 - RNA, 38 nt, Artificial Sequence
  Description of Artificial Sequence:  Enzymatic Nucleic Acid
aaaacacacugaugaggccguuaggccgaaaaauuagu

SEQ ID NO: 9625 - RNA, 38 nt, Artificial Sequence
  Description of Artificial Sequence:  Enzymatic Nucleic Acid
aaaaacaccugaugaggccguuaggccgaaaaaauuag

SEQ ID NO: 9626 - RNA, 38 nt, Artificial Sequence
  Description of Artificial Sequence:  Enzymatic Nucleic Acid
uuauuaaacugaugaggccguuaggccgaaacacaaaa

SEQ ID NO: 9627 - RNA, 38 nt, Artificial Sequence
  Description of Artificial Sequence:  Enzymatic Nucleic Acid
uuuauuaacugaugaggccguuaggccgaaaacacaaa

SEQ ID NO: 9628 - RNA, 38 nt, Artificial Sequence
  Description of Artificial Sequence:  Enzymatic Nucleic Acid
cuuuauuacugaugaggccguuaggccgaaaaacacaa

SEQ ID NO: 9629 - RNA, 38 nt, Artificial Sequence
  Description of Artificial Sequence:  Enzymatic Nucleic Acid
ucuuuauucugaugaggccguuaggccgaaaaaacaca

SEQ ID NO: 9630 - RNA, 38 nt, Artificial Sequence
  Description of Artificial Sequence:  Enzymatic Nucleic Acid
gucuuuaucugaugaggccguuaggccgaaaaaaacac

SEQ ID NO: 9631 - RNA, 38 nt, Artificial Sequence
  Description of Artificial Sequence:  Enzymatic Nucleic Acid
ccugucuucugaugaggccguuaggccgaaauuaaaaa

SEQ ID NO: 9632 - RNA, 38 nt, Artificial Sequence
  Description of Artificial Sequence:  Enzymatic Nucleic Acid
cauggugacugaugaggccguuaggccgaaacccuguc

SEQ ID NO: 9633 - RNA, 38 nt, Artificial Sequence
  Description of Artificial Sequence:  Enzymatic Nucleic Acid
acauggugcugaugaggccguuaggccgaaaacccugu

SEQ ID NO: 9634 - RNA, 38 nt, Artificial Sequence
  Description of Artificial Sequence:  Enzymatic Nucleic Acid
aacauggucugaugaggccguuaggccgaaaaacccug

SEQ ID NO: 9635 - RNA, 38 nt, Artificial Sequence
  Description of Artificial Sequence:  Enzymatic Nucleic Acid
gccuggcccugaugaggccguuaggccgaaacauggug

SEQ ID NO: 9636 - RNA, 38 nt, Artificial Sequence
  Description of Artificial Sequence:  Enzymatic Nucleic Acid
gaguuugacugaugaggccguuaggccgaaaccagccu

SEQ ID NO: 9637 - RNA, 38 nt, Artificial Sequence
  Description of Artificial Sequence:  Enzymatic Nucleic Acid
aggaguuucugaugaggccguuaggccgaaagaccagc

SEQ ID NO: 9638 - RNA, 38 nt, Artificial Sequence
  Description of Artificial Sequence:  Enzymatic Nucleic Acid
gaggucagcugaugaggccguuaggccgaaaguuugag

SEQ ID NO: 9639 - RNA, 38 nt, Artificial Sequence
  Description of Artificial Sequence:  Enzymatic Nucleic Acid
gauuacuucugaugaggccguuaggccgaaaggucagg

SEQ ID NO: 9640 - RNA, 38 nt, Artificial Sequence
  Description of Artificial Sequence:  Enzymatic Nucleic Acid
agguggaucugaugaggccguuaggccgaaacuugagg

SEQ ID NO: 9641 - RNA, 38 nt, Artificial Sequence
  Description of Artificial Sequence:  Enzymatic Nucleic Acid
ggcaggugcugaugaggccguuaggccgaaauuacuug

SEQ ID NO: 9642 - RNA, 38 nt, Artificial Sequence
  Description of Artificial Sequence:  Enzymatic Nucleic Acid
gggaggcccugaugaggccguuaggccgaaaggcaggu

SEQ ID NO: 9643 - RNA, 38 nt, Artificial Sequence
  Description of Artificial Sequence:  Enzymatic Nucleic Acid
cacuuuggcugaugaggccguuaggccgaaaggccgag

SEQ ID NO: 9644 - RNA, 38 nt, Artificial Sequence
  Description of Artificial Sequence:  Enzymatic Nucleic Acid
aucccugucugaugaggccguuaggccgaaaucccagc

SEQ ID NO: 9645 - RNA, 38 nt, Artificial Sequence
  Description of Artificial Sequence:  Enzymatic Nucleic Acid
caucccugcugaugaggccguuaggccgaaaaucccag

SEQ ID NO: 9646 - RNA, 38 nt, Artificial Sequence
  Description of Artificial Sequence:  Enzymatic Nucleic Acid
aaagagaucugaugaggccguuaggccgaaaggcuggg

SEQ ID NO: 9647 - RNA, 38 nt, Artificial Sequence
  Description of Artificial Sequence:  Enzymatic Nucleic Acid
aacaaagacugaugaggccguuaggccgaaaugaggcu

SEQ ID NO: 9648 - RNA, 38 nt, Artificial Sequence
  Description of Artificial Sequence:  Enzymatic Nucleic Acid
agaacaaacugaugaggccguuaggccgaaagaugagg

SEQ ID NO: 9649 - RNA, 38 nt, Artificial Sequence
  Description of Artificial Sequence:  Enzymatic Nucleic Acid
uuagaacacugaugaggccguuaggccgaaagagauga

SEQ ID NO: 9650 - RNA, 38 nt, Artificial Sequence
  Description of Artificial Sequence:  Enzymatic Nucleic Acid
uuuagaaccugaugaggccguuaggccgaaaagagaug

SEQ ID NO: 9651 - RNA, 38 nt, Artificial Sequence
  Description of Artificial Sequence:  Enzymatic Nucleic Acid
aucuuuagcugaugaggccguuaggccgaaacaaagag

SEQ ID NO: 9652 - RNA, 38 nt, Artificial Sequence
  Description of Artificial Sequence:  Enzymatic Nucleic Acid
caucuuuacugaugaggccguuaggccgaaaacaaaga

SEQ ID NO: 9653 - RNA, 38 nt, Artificial Sequence
  Description of Artificial Sequence:  Enzymatic Nucleic Acid
uccaucuucugaugaggccguuaggccgaaagaacaaa

SEQ ID NO: 9654 - RNA, 38 nt, Artificial Sequence
  Description of Artificial Sequence:  Enzymatic Nucleic Acid
aaaaagaacugaugaggccguuaggccgaaauuugggg

SEQ ID NO: 9655 - RNA, 38 nt, Artificial Sequence
  Description of Artificial Sequence:  Enzymatic Nucleic Acid
uaaaaagacugaugaggccguuaggccgaaaauuuggg

SEQ ID NO: 9656 - RNA, 38 nt, Artificial Sequence
  Description of Artificial Sequence:  Enzymatic Nucleic Acid
auaaaaagcugaugaggccguuaggccgaaaaauuugg

SEQ ID NO: 9657 - RNA, 38 nt, Artificial Sequence
  Description of Artificial Sequence:  Enzymatic Nucleic Acid
uauaaaaacugaugaggccguuaggccgaaaaaauuug

SEQ ID NO: 9658 - RNA, 38 nt, Artificial Sequence
  Description of Artificial Sequence:  Enzymatic Nucleic Acid
aguauaaacugaugaggccguuaggccgaaagaaaauu

SEQ ID NO: 9659 - RNA, 38 nt, Artificial Sequence
  Description of Artificial Sequence:  Enzymatic Nucleic Acid
uaguauaacugaugaggccguuaggccgaaaagaaaau

SEQ ID NO: 9660 - RNA, 38 nt, Artificial Sequence
  Description of Artificial Sequence:  Enzymatic Nucleic Acid
auaguauacugaugaggccguuaggccgaaaaagaaaa

SEQ ID NO: 9661 - RNA, 38 nt, Artificial Sequence
  Description of Artificial Sequence:  Enzymatic Nucleic Acid
aauaguaucugaugaggccguuaggccgaaaaaagaaa

SEQ ID NO: 9662 - RNA, 38 nt, Artificial Sequence
  Description of Artificial Sequence:  Enzymatic Nucleic Acid
uaauaguacugaugaggccguuaggccgaaaaaaagaa

SEQ ID NO: 9663 - RNA, 38 nt, Artificial Sequence
  Description of Artificial Sequence:  Enzymatic Nucleic Acid
auuaauagcugaugaggccguuaggccgaaauaaaaag

SEQ ID NO: 9664 - RNA, 38 nt, Artificial Sequence
  Description of Artificial Sequence:  Enzymatic Nucleic Acid
uucauuaacugaugaggccguuaggccgaaaguauaaa

SEQ ID NO: 9665 - RNA, 38 nt, Artificial Sequence
  Description of Artificial Sequence:  Enzymatic Nucleic Acid
gauucauucugaugaggccguuaggccgaaauaguaua

SEQ ID NO: 9666 - RNA, 38 nt, Artificial Sequence
  Description of Artificial Sequence:  Enzymatic Nucleic Acid
ugauucaucugaugaggccguuaggccgaaaauaguau

SEQ ID NO: 9667 - RNA, 38 nt, Artificial Sequence
  Description of Artificial Sequence:  Enzymatic Nucleic Acid
aauugauucugaugaggccguuaggccgaaauucauua

SEQ ID NO: 9668 - RNA, 38 nt, Artificial Sequence
  Description of Artificial Sequence:  Enzymatic Nucleic Acid
uaugaauucugaugaggccguuaggccgaaauugauuc

SEQ ID NO: 9669 - RNA, 38 nt, Artificial Sequence
  Description of Artificial Sequence:  Enzymatic Nucleic Acid
uagauaugcugaugaggccguuaggccgaaauugauug

SEQ ID NO: 9670 - RNA, 38 nt, Artificial Sequence
  Description of Artificial Sequence:  Enzymatic Nucleic Acid
auagauaucugaugaggccguuaggccgaaaauugauu

SEQ ID NO: 9671 - RNA, 38 nt, Artificial Sequence
  Description of Artificial Sequence:  Enzymatic Nucleic Acid
uaaauagacugaugaggccguuaggccgaaaugaauug

SEQ ID NO: 9672 - RNA, 38 nt, Artificial Sequence
  Description of Artificial Sequence:  Enzymatic Nucleic Acid
aauaaauacugaugaggccguuaggccgaaauaugaau

SEQ ID NO: 9673 - RNA, 38 nt, Artificial Sequence
  Description of Artificial Sequence:  Enzymatic Nucleic Acid
uuaauaaacugaugaggccguuaggccgaaagauauga

SEQ ID NO: 9674 - RNA, 38 nt, Artificial Sequence
  Description of Artificial Sequence:  Enzymatic Nucleic Acid
auuuaauacugaugaggccguuaggccgaaauagauau

SEQ ID NO: 9675 - RNA, 38 nt, Artificial Sequence
  Description of Artificial Sequence:  Enzymatic Nucleic Acid
aauuuaaucugaugaggccguuaggccgaaaauagaua

SEQ ID NO: 9676 - RNA, 38 nt, Artificial Sequence
  Description of Artificial Sequence:  Enzymatic Nucleic Acid
aaauuuaacugaugaggccguuaggccgaaaaauagau

SEQ ID NO: 9677 - RNA, 38 nt, Artificial Sequence
  Description of Artificial Sequence:  Enzymatic Nucleic Acid
agaaauuucugaugaggccguuaggccgaaauaaauag

SEQ ID NO: 9678 - RNA, 38 nt, Artificial Sequence
  Description of Artificial Sequence:  Enzymatic Nucleic Acid
uagaaauucugaugaggccguuaggccgaaaauaaaua

SEQ ID NO: 9679 - RNA, 38 nt, Artificial Sequence
  Description of Artificial Sequence:  Enzymatic Nucleic Acid
gcgguagacugaugaggccguuaggccgaaauuuaaua

SEQ ID NO: 9680 - RNA, 38 nt, Artificial Sequence
  Description of Artificial Sequence:  Enzymatic Nucleic Acid
agcgguagcugaugaggccguuaggccgaaaauuuaau

SEQ ID NO: 9681 - RNA, 38 nt, Artificial Sequence
  Description of Artificial Sequence:  Enzymatic Nucleic Acid
aagcgguacugaugaggccguuaggccgaaaaauuuaa

SEQ ID NO: 9682 - RNA, 38 nt, Artificial Sequence
  Description of Artificial Sequence:  Enzymatic Nucleic Acid
aaaagcggcugaugaggccguuaggccgaaagaaauuu

SEQ ID NO: 9683 - RNA, 38 nt, Artificial Sequence
  Description of Artificial Sequence:  Enzymatic Nucleic Acid
uggccuaacugaugaggccguuaggccgaaagcgguag

SEQ ID NO: 9684 - RNA, 38 nt, Artificial Sequence
  Description of Artificial Sequence:  Enzymatic Nucleic Acid
uuggccuacugaugaggccguuaggccgaaaagcggua

SEQ ID NO: 9685 - RNA, 38 nt, Artificial Sequence
  Description of Artificial Sequence:  Enzymatic Nucleic Acid
uuuggccucugaugaggccguuaggccgaaaaagcggu

SEQ ID NO: 9686 - RNA, 38 nt, Artificial Sequence
  Description of Artificial Sequence:  Enzymatic Nucleic Acid
uuuuggcccugaugaggccguuaggccgaaaaaagcgg

SEQ ID NO: 9687 - RNA, 38 nt, Artificial Sequence
  Description of Artificial Sequence:  Enzymatic Nucleic Acid
aacgaucucugaugaggccguuaggccgaaacauuuuu

SEQ ID NO: 9688 - RNA, 38 nt, Artificial Sequence
  Description of Artificial Sequence:  Enzymatic Nucleic Acid
cagagaaccugaugaggccguuaggccgaaaucuuaca

SEQ ID NO: 9689 - RNA, 38 nt, Artificial Sequence
  Description of Artificial Sequence:  Enzymatic Nucleic Acid
aggcagagcugaugaggccguuaggccgaaacgaucuu

SEQ ID NO: 9690 - RNA, 38 nt, Artificial Sequence
  Description of Artificial Sequence:  Enzymatic Nucleic Acid
gaggcagacugaugaggccguuaggccgaaaacgaucu

SEQ ID NO: 9691 - RNA, 38 nt, Artificial Sequence
  Description of Artificial Sequence:  Enzymatic Nucleic Acid
gugaggcacugaugaggccguuaggccgaaagaacgau

SEQ ID NO: 9692 - RNA, 38 nt, Artificial Sequence
  Description of Artificial Sequence:  Enzymatic Nucleic Acid
agcuaugucugaugaggccguuaggccgaaaggcagag

SEQ ID NO: 9693 - RNA, 38 nt, Artificial Sequence
  Description of Artificial Sequence:  Enzymatic Nucleic Acid
uuguaagccugaugaggccguuaggccgaaaugugagg

SEQ ID NO: 9694 - RNA, 38 nt, Artificial Sequence
  Description of Artificial Sequence:  Enzymatic Nucleic Acid
uggcuugucugaugaggccguuaggccgaaagcuaugu

SEQ ID NO: 9695 - RNA, 38 nt, Artificial Sequence
  Description of Artificial Sequence:  Enzymatic Nucleic Acid
cuggcuugcugaugaggccguuaggccgaaaagcuaug

SEQ ID NO: 9696 - RNA, 38 nt, Artificial Sequence
  Description of Artificial Sequence:  Enzymatic Nucleic Acid
gaguaccacugaugaggccguuaggccgaaauuucucc

SEQ ID NO: 9697 - RNA, 38 nt, Artificial Sequence
  Description of Artificial Sequence:  Enzymatic Nucleic Acid
uuaaugagcugaugaggccguuaggccgaaaccauauu

SEQ ID NO: 9698 - RNA, 38 nt, Artificial Sequence
  Description of Artificial Sequence:  Enzymatic Nucleic Acid
uuuuuaaucugaugaggccguuaggccgaaaguaccau

SEQ ID NO: 9699 - RNA, 38 nt, Artificial Sequence
  Description of Artificial Sequence:  Enzymatic Nucleic Acid
uuuuuuuucugaugaggccguuaggccgaaaugaguac

SEQ ID NO: 9700 - RNA, 38 nt, Artificial Sequence
  Description of Artificial Sequence:  Enzymatic Nucleic Acid
uuuuuuuucugaugaggccguuaggccgaaaaugagua

SEQ ID NO: 9701 - RNA, 38 nt, Artificial Sequence
  Description of Artificial Sequence:  Enzymatic Nucleic Acid
  misc_feature (31)..(31): n stands for inosine
gagcaaaccugaugaggccguuaggccgaancgccgcc

SEQ ID NO: 9702 - RNA, 38 nt, Artificial Sequence
  Description of Artificial Sequence:  Enzymatic Nucleic Acid
  misc_feature (31)..(31): n stands for inosine
aaaguaugcugaugaggccguuaggccgaancaaacug

SEQ ID NO: 9703 - RNA, 38 nt, Artificial Sequence
  Description of Artificial Sequence:  Enzymatic Nucleic Acid
  misc_feature (31)..(31): n stands for inosine
acaaaguacugaugaggccguuaggccgaanagcaaac

SEQ ID NO: 9704 - RNA, 38 nt, Artificial Sequence
  Description of Artificial Sequence:  Enzymatic Nucleic Acid
  misc_feature (31)..(31): n stands for inosine
agucacaacugaugaggccguuaggccgaanuaugagc

SEQ ID NO: 9705 - RNA, 38 nt, Artificial Sequence
  Description of Artificial Sequence:  Enzymatic Nucleic Acid
  misc_feature (31)..(31): n stands for inosine
ugaccgcacugaugaggccguuaggccgaanucacaaa

SEQ ID NO: 9706 - RNA, 38 nt, Artificial Sequence
  Description of Artificial Sequence:  Enzymatic Nucleic Acid
  misc_feature (31)..(31): n stands for inosine
ugccacugcugaugaggccguuaggccgaanaccgcaa

SEQ ID NO: 9707 - RNA, 38 nt, Artificial Sequence
  Description of Artificial Sequence:  Enzymatic Nucleic Acid
  misc_feature (31)..(31): n stands for inosine
aaugccaccugaugaggccguuaggccgaanugaccgc

SEQ ID NO: 9708 - RNA, 38 nt, Artificial Sequence
  Description of Artificial Sequence:  Enzymatic Nucleic Acid
  misc_feature (31)..(31): n stands for inosine
gagcugaacugaugaggccguuaggccgaanccacugu

SEQ ID NO: 9709 - RNA, 38 nt, Artificial Sequence
  Description of Artificial Sequence:  Enzymatic Nucleic Acid
  misc_feature (31)..(31): n stands for inosine
uguggagccugaugaggccguuaggccgaanaaugcca

SEQ ID NO: 9710 - RNA, 38 nt, Artificial Sequence
  Description of Artificial Sequence:  Enzymatic Nucleic Acid
  misc_feature (31)..(31): n stands for inosine
aaguguggcugaugaggccguuaggccgaancugaaug

SEQ ID NO: 9711 - RNA, 38 nt, Artificial Sequence
  Description of Artificial Sequence:  Enzymatic Nucleic Acid
  misc_feature (31)..(31): n stands for inosine
ccaagugucugaugaggccguuaggccgaanagcugaa

SEQ ID NO: 9712 - RNA, 38 nt, Artificial Sequence
  Description of Artificial Sequence:  Enzymatic Nucleic Acid
  misc_feature (31)..(31): n stands for inosine
accaagugcugaugaggccguuaggccgaangagcuga

SEQ ID NO: 9713 - RNA, 38 nt, Artificial Sequence
  Description of Artificial Sequence:  Enzymatic Nucleic Acid
  misc_feature (31)..(31): n stands for inosine
cuaccaagcugaugaggccguuaggccgaanuggagcu

SEQ ID NO: 9714 - RNA, 38 nt, Artificial Sequence
  Description of Artificial Sequence:  Enzymatic Nucleic Acid
  misc_feature (31)..(31): n stands for inosine
uucuaccacugaugaggccguuaggccgaanuguggag

SEQ ID NO: 9715 - RNA, 38 nt, Artificial Sequence
  Description of Artificial Sequence:  Enzymatic Nucleic Acid
  misc_feature (31)..(31): n stands for inosine
gugccugucugaugaggccguuaggccgaanuucuacc

SEQ ID NO: 9716 - RNA, 38 nt, Artificial Sequence
  Description of Artificial Sequence:  Enzymatic Nucleic Acid
  misc_feature (31)..(31): n stands for inosine
cgugccugcugaugaggccguuaggccgaanguucuac

SEQ ID NO: 9717 - RNA, 38 nt, Artificial Sequence
  Description of Artificial Sequence:  Enzymatic Nucleic Acid
  misc_feature (31)..(31): n stands for inosine
gucgugcccugaugaggccguuaggccgaanugguucu

SEQ ID NO: 9718 - RNA, 38 nt, Artificial Sequence
  Description of Artificial Sequence:  Enzymatic Nucleic Acid
  misc_feature (31)..(31): n stands for inosine
gcuugucgcugaugaggccguuaggccgaanccugugg

SEQ ID NO: 9719 - RNA, 38 nt, Artificial Sequence
  Description of Artificial Sequence:  Enzymatic Nucleic Acid
  misc_feature (31)..(31): n stands for inosine
ucuaugcucugaugaggccguuaggccgaanucgugcc

SEQ ID NO: 9720 - RNA, 38 nt, Artificial Sequence
  Description of Artificial Sequence:  Enzymatic Nucleic Acid
  misc_feature (31)..(31): n stands for inosine
uguuucuacugaugaggccguuaggccgaancuugucg

SEQ ID NO: 9721 - RNA, 38 nt, Artificial Sequence
  Description of Artificial Sequence:  Enzymatic Nucleic Acid
  misc_feature (31)..(31): n stands for inosine
guuuaggacugaugaggccguuaggccgaanuuucuau

SEQ ID NO: 9722 - RNA, 38 nt, Artificial Sequence
  Description of Artificial Sequence:  Enzymatic Nucleic Acid
  misc_feature (31)..(31): n stands for inosine
auuguuuacugaugaggccguuaggccgaanauguuuc

SEQ ID NO: 9723 - RNA, 38 nt, Artificial Sequence
  Description of Artificial Sequence:  Enzymatic Nucleic Acid
  misc_feature (31)..(31): n stands for inosine
gauuguuucugaugaggccguuaggccgaangauguuu

SEQ ID NO: 9724 - RNA, 38 nt, Artificial Sequence
  Description of Artificial Sequence:  Enzymatic Nucleic Acid
  misc_feature (31)..(31): n stands for inosine
augaagaucugaugaggccguuaggccgaanuuuagga

SEQ ID NO: 9725 - RNA, 38 nt, Artificial Sequence
  Description of Artificial Sequence:  Enzymatic Nucleic Acid
  misc_feature (31)..(31): n stands for inosine
cucgaugacugaugaggccguuaggccgaanauuguuu

SEQ ID NO: 9726 - RNA, 38 nt, Artificial Sequence
  Description of Artificial Sequence:  Enzymatic Nucleic Acid
  misc_feature (31)..(31): n stands for inosine
ugccucgacugaugaggccguuaggccgaanaagauug

SEQ ID NO: 9727 - RNA, 38 nt, Artificial Sequence
  Description of Artificial Sequence:  Enzymatic Nucleic Acid
  misc_feature (31)..(31): n stands for inosine
gaccucgacugaugaggccguuaggccgaanccucgau

SEQ ID NO: 9728 - RNA, 38 nt, Artificial Sequence
  Description of Artificial Sequence:  Enzymatic Nucleic Acid
  misc_feature (31)..(31): n stands for inosine
auugggaucugaugaggccguuaggccgaanaccucga

SEQ ID NO: 9729 - RNA, 38 nt, Artificial Sequence
  Description of Artificial Sequence:  Enzymatic Nucleic Acid
  misc_feature (31)..(31): n stands for inosine
uauugggacugaugaggccguuaggccgaangaccucg

SEQ ID NO: 9730 - RNA, 38 nt, Artificial Sequence
  Description of Artificial Sequence:  Enzymatic Nucleic Acid
  misc_feature (31)..(31): n stands for inosine
uuuuauugcugaugaggccguuaggccgaanauggacc

SEQ ID NO: 9731 - RNA, 38 nt, Artificial Sequence
  Description of Artificial Sequence:  Enzymatic Nucleic Acid
  misc_feature (31)..(31): n stands for inosine
uuuuuauucugaugaggccguuaggccgaangauggac

SEQ ID NO: 9732 - RNA, 38 nt, Artificial Sequence
  Description of Artificial Sequence:  Enzymatic Nucleic Acid
  misc_feature (31)..(31): n stands for inosine
auuuuuaucugaugaggccguuaggccgaanggaugga

SEQ ID NO: 9733 - RNA, 38 nt, Artificial Sequence
  Description of Artificial Sequence:  Enzymatic Nucleic Acid
  misc_feature (31)..(31): n stands for inosine
gggucucccugaugaggccguuaggccgaanauuuuua

SEQ ID NO: 9734 - RNA, 38 nt, Artificial Sequence
  Description of Artificial Sequence:  Enzymatic Nucleic Acid
  misc_feature (31)..(31): n stands for inosine
auagccagcugaugaggccguuaggccgaanucuccug

SEQ ID NO: 9735 - RNA, 38 nt, Artificial Sequence
  Description of Artificial Sequence:  Enzymatic Nucleic Acid
  misc_feature (31)..(31): n stands for inosine
gauagccacugaugaggccguuaggccgaangucuccu

SEQ ID NO: 9736 - RNA, 38 nt, Artificial Sequence
  Description of Artificial Sequence:  Enzymatic Nucleic Acid
  misc_feature (31)..(31): n stands for inosine
ugauagcccugaugaggccguuaggccgaanggucucc

SEQ ID NO: 9737 - RNA, 38 nt, Artificial Sequence
  Description of Artificial Sequence:  Enzymatic Nucleic Acid
  misc_feature (31)..(31): n stands for inosine
ucuaugaucugaugaggccguuaggccgaanccagggu

SEQ ID NO: 9738 - RNA, 38 nt, Artificial Sequence
  Description of Artificial Sequence:  Enzymatic Nucleic Acid
  misc_feature (31)..(31): n stands for inosine
aaggucuacugaugaggccguuaggccgaanauagcca

SEQ ID NO: 9739 - RNA, 38 nt, Artificial Sequence
  Description of Artificial Sequence:  Enzymatic Nucleic Acid
  misc_feature (31)..(31): n stands for inosine
aagacuaacugaugaggccguuaggccgaanucuauga

SEQ ID NO: 9740 - RNA, 38 nt, Artificial Sequence
  Description of Artificial Sequence:  Enzymatic Nucleic Acid
  misc_feature (31)..(31): n stands for inosine
gaagacuacugaugaggccguuaggccgaangucuaug

SEQ ID NO: 9741 - RNA, 38 nt, Artificial Sequence
  Description of Artificial Sequence:  Enzymatic Nucleic Acid
  misc_feature (31)..(31): n stands for inosine
accagcgacugaugaggccguuaggccgaanacuaagg

SEQ ID NO: 9742 - RNA, 38 nt, Artificial Sequence
  Description of Artificial Sequence:  Enzymatic Nucleic Acid
  misc_feature (31)..(31): n stands for inosine
aguauacccugaugaggccguuaggccgaancgaagac

SEQ ID NO: 9743 - RNA, 38 nt, Artificial Sequence
  Description of Artificial Sequence:  Enzymatic Nucleic Acid
  misc_feature (31)..(31): n stands for inosine
agacagcgcugaugaggccguuaggccgaanuauacca

SEQ ID NO: 9744 - RNA, 38 nt, Artificial Sequence
  Description of Artificial Sequence:  Enzymatic Nucleic Acid
  misc_feature (31)..(31): n stands for inosine
ugacagaccugaugaggccguuaggccgaancgaguau

SEQ ID NO: 9745 - RNA, 38 nt, Artificial Sequence
  Description of Artificial Sequence:  Enzymatic Nucleic Acid
  misc_feature (31)..(31): n stands for inosine
ugguugaccugaugaggccguuaggccgaanacagcga

SEQ ID NO: 9746 - RNA, 38 nt, Artificial Sequence
  Description of Artificial Sequence:  Enzymatic Nucleic Acid
  misc_feature (31)..(31): n stands for inosine
ccgcuggucugaugaggccguuaggccgaanacagaca

SEQ ID NO: 9747 - RNA, 38 nt, Artificial Sequence
  Description of Artificial Sequence:  Enzymatic Nucleic Acid
  misc_feature (31)..(31): n stands for inosine
caaccgcucugaugaggccguuaggccgaanuugacag

SEQ ID NO: 9748 - RNA, 38 nt, Artificial Sequence
  Description of Artificial Sequence:  Enzymatic Nucleic Acid
  misc_feature (31)..(31): n stands for inosine
ucaaccgccugaugaggccguuaggccgaanguugaca

SEQ ID NO: 9749 - RNA, 38 nt, Artificial Sequence
  Description of Artificial Sequence:  Enzymatic Nucleic Acid
  misc_feature (31)..(31): n stands for inosine
uuaaaaaacugaugaggccguuaggccgaanucaaccg

SEQ ID NO: 9750 - RNA, 38 nt, Artificial Sequence
  Description of Artificial Sequence:  Enzymatic Nucleic Acid
  misc_feature (31)..(31): n stands for inosine
aaaaagaacugaugaggccguuaggccgaancuuaaaa

SEQ ID NO: 9751 - RNA, 38 nt, Artificial Sequence
  Description of Artificial Sequence:  Enzymatic Nucleic Acid
  misc_feature (31)..(31): n stands for inosine
aaaaaagacugaugaggccguuaggccgaangcuuaaa

SEQ ID NO: 9752 - RNA, 38 nt, Artificial Sequence
  Description of Artificial Sequence:  Enzymatic Nucleic Acid
  misc_feature (31)..(31): n stands for inosine
gagaaaaacugaugaggccguuaggccgaanaaggcuu

SEQ ID NO: 9753 - RNA, 38 nt, Artificial Sequence
  Description of Artificial Sequence:  Enzymatic Nucleic Acid
  misc_feature (31)..(31): n stands for inosine
gguaaaagcugaugaggccguuaggccgaanaaaaaag

SEQ ID NO: 9754 - RNA, 38 nt, Artificial Sequence
  Description of Artificial Sequence:  Enzymatic Nucleic Acid
  misc_feature (31)..(31): n stands for inosine
cugguaaacugaugaggccguuaggccgaanagaaaaa

SEQ ID NO: 9755 - RNA, 38 nt, Artificial Sequence
  Description of Artificial Sequence:  Enzymatic Nucleic Acid
  misc_feature (31)..(31): n stands for inosine
cagaaacucugaugaggccguuaggccgaanuaaaaga

SEQ ID NO: 9756 - RNA, 38 nt, Artificial Sequence
  Description of Artificial Sequence:  Enzymatic Nucleic Acid
  misc_feature (31)..(31): n stands for inosine
ccagaaaccugaugaggccguuaggccgaanguaaaag

SEQ ID NO: 9757 - RNA, 38 nt, Artificial Sequence
  Description of Artificial Sequence:  Enzymatic Nucleic Acid
  misc_feature (31)..(31): n stands for inosine
uuugcucccugaugaggccguuaggccgaanaaacugg

SEQ ID NO: 9758 - RNA, 38 nt, Artificial Sequence
  Description of Artificial Sequence:  Enzymatic Nucleic Acid
  misc_feature (31)..(31): n stands for inosine
acugaauucugaugaggccguuaggccgaancuccaga

SEQ ID NO: 9759 - RNA, 38 nt, Artificial Sequence
  Description of Artificial Sequence:  Enzymatic Nucleic Acid
  misc_feature (31)..(31): n stands for inosine
aggcaaaccugaugaggccguuaggccgaanaauuugc

SEQ ID NO: 9760 - RNA, 38 nt, Artificial Sequence
  Description of Artificial Sequence:  Enzymatic Nucleic Acid
  misc_feature (31)..(31): n stands for inosine
uccaggaacugaugaggccguuaggccgaancaaacug

SEQ ID NO: 9761 - RNA, 38 nt, Artificial Sequence
  Description of Artificial Sequence:  Enzymatic Nucleic Acid
  misc_feature (31)..(31): n stands for inosine
auccaggacugaugaggccguuaggccgaangcaaacu

SEQ ID NO: 9762 - RNA, 38 nt, Artificial Sequence
  Description of Artificial Sequence:  Enzymatic Nucleic Acid
  misc_feature (31)..(31): n stands for inosine
caaauccacugaugaggccguuaggccgaanaaggcaa

SEQ ID NO: 9763 - RNA, 38 nt, Artificial Sequence
  Description of Artificial Sequence:  Enzymatic Nucleic Acid
  misc_feature (31)..(31): n stands for inosine
acaaaucccugaugaggccguuaggccgaangaaggca

SEQ ID NO: 9764 - RNA, 38 nt, Artificial Sequence
  Description of Artificial Sequence:  Enzymatic Nucleic Acid
  misc_feature (31)..(31): n stands for inosine
aguuuugacugaugaggccguuaggccgaanucauuac

SEQ ID NO: 9765 - RNA, 38 nt, Artificial Sequence
  Description of Artificial Sequence:  Enzymatic Nucleic Acid
  misc_feature (31)..(31): n stands for inosine
aaguuuugcugaugaggccguuaggccgaangucauua

SEQ ID NO: 9766 - RNA, 38 nt, Artificial Sequence
  Description of Artificial Sequence:  Enzymatic Nucleic Acid
  misc_feature (31)..(31): n stands for inosine
uaaaguuucugaugaggccguuaggccgaanaggucau

SEQ ID NO: 9767 - RNA, 38 nt, Artificial Sequence
  Description of Artificial Sequence:  Enzymatic Nucleic Acid
  misc_feature (31)..(31): n stands for inosine
acugcuaacugaugaggccguuaggccgaanuuuugag

SEQ ID NO: 9768 - RNA, 38 nt, Artificial Sequence
  Description of Artificial Sequence:  Enzymatic Nucleic Acid
  misc_feature (31)..(31): n stands for inosine
ggaagaaccugaugaggccguuaggccgaancuaaagu

SEQ ID NO: 9769 - RNA, 38 nt, Artificial Sequence
  Description of Artificial Sequence:  Enzymatic Nucleic Acid
  misc_feature (31)..(31): n stands for inosine
cagauggacugaugaggccguuaggccgaanaacugcu

SEQ ID NO: 9770 - RNA, 38 nt, Artificial Sequence
  Description of Artificial Sequence:  Enzymatic Nucleic Acid
  misc_feature (31)..(31): n stands for inosine
agucagaucugaugaggccguuaggccgaanaagaacu

SEQ ID NO: 9771 - RNA, 38 nt, Artificial Sequence
  Description of Artificial Sequence:  Enzymatic Nucleic Acid
  misc_feature (31)..(31): n stands for inosine
gagucagacugaugaggccguuaggccgaangaagaac

SEQ ID NO: 9772 - RNA, 38 nt, Artificial Sequence
  Description of Artificial Sequence:  Enzymatic Nucleic Acid
  misc_feature (31)..(31): n stands for inosine
ccugaguccugaugaggccguuaggccgaanauggaag

SEQ ID NO: 9773 - RNA, 38 nt, Artificial Sequence
  Description of Artificial Sequence:  Enzymatic Nucleic Acid
  misc_feature (31)..(31): n stands for inosine
caaaccugcugaugaggccguuaggccgaanucagaug

SEQ ID NO: 9774 - RNA, 38 nt, Artificial Sequence
  Description of Artificial Sequence:  Enzymatic Nucleic Acid
  misc_feature (31)..(31): n stands for inosine
agcaaacccugaugaggccguuaggccgaanagucaga

SEQ ID NO: 9775 - RNA, 38 nt, Artificial Sequence
  Description of Artificial Sequence:  Enzymatic Nucleic Acid
  misc_feature (31)..(31): n stands for inosine
gccagagacugaugaggccguuaggccgaancaaaccu

SEQ ID NO: 9776 - RNA, 38 nt, Artificial Sequence
  Description of Artificial Sequence:  Enzymatic Nucleic Acid
  misc_feature (31)..(31): n stands for inosine
accgccagcugaugaggccguuaggccgaanaagcaaa

SEQ ID NO: 9777 - RNA, 38 nt, Artificial Sequence
  Description of Artificial Sequence:  Enzymatic Nucleic Acid
  misc_feature (31)..(31): n stands for inosine
agaccgcccugaugaggccguuaggccgaanagaagca

SEQ ID NO: 9778 - RNA, 38 nt, Artificial Sequence
  Description of Artificial Sequence:  Enzymatic Nucleic Acid
  misc_feature (31)..(31): n stands for inosine
gauucugacugaugaggccguuaggccgaanaccgcca

SEQ ID NO: 9779 - RNA, 38 nt, Artificial Sequence
  Description of Artificial Sequence:  Enzymatic Nucleic Acid
  misc_feature (31)..(31): n stands for inosine
guugauuccugaugaggccguuaggccgaanaagaccg

SEQ ID NO: 9780 - RNA, 38 nt, Artificial Sequence
  Description of Artificial Sequence:  Enzymatic Nucleic Acid
  misc_feature (31)..(31): n stands for inosine
guggaugucugaugaggccguuaggccgaanauucuga

SEQ ID NO: 9781 - RNA, 38 nt, Artificial Sequence
  Description of Artificial Sequence:  Enzymatic Nucleic Acid
  misc_feature (31)..(31): n stands for inosine
aguguggacugaugaggccguuaggccgaanuugauuc

SEQ ID NO: 9782 - RNA, 38 nt, Artificial Sequence
  Description of Artificial Sequence:  Enzymatic Nucleic Acid
  misc_feature (31)..(31): n stands for inosine
ggaagugucugaugaggccguuaggccgaanauguuga

SEQ ID NO: 9783 - RNA, 38 nt, Artificial Sequence
  Description of Artificial Sequence:  Enzymatic Nucleic Acid
  misc_feature (31)..(31): n stands for inosine
cggaagugcugaugaggccguuaggccgaangauguug

SEQ ID NO: 9784 - RNA, 38 nt, Artificial Sequence
  Description of Artificial Sequence:  Enzymatic Nucleic Acid
  misc_feature (31)..(31): n stands for inosine
cacggaagcugaugaggccguuaggccgaanuggaugu

SEQ ID NO: 9785 - RNA, 38 nt, Artificial Sequence
  Description of Artificial Sequence:  Enzymatic Nucleic Acid
  misc_feature (31)..(31): n stands for inosine
aucacggacugaugaggccguuaggccgaanuguggau

SEQ ID NO: 9786 - RNA, 38 nt, Artificial Sequence
  Description of Artificial Sequence:  Enzymatic Nucleic Acid
  misc_feature (31)..(31): n stands for inosine
auaaucaccugaugaggccguuaggccgaanaagugug

SEQ ID NO: 9787 - RNA, 38 nt, Artificial Sequence
  Description of Artificial Sequence:  Enzymatic Nucleic Acid
  misc_feature (31)..(31): n stands for inosine
augcacgccugaugaggccguuaggccgaanauaauca

SEQ ID NO: 9788 - RNA, 38 nt, Artificial Sequence
  Description of Artificial Sequence:  Enzymatic Nucleic Acid
  misc_feature (31)..(31): n stands for inosine
guccaaaacugaugaggccguuaggccgaancacgcag

SEQ ID NO: 9789 - RNA, 38 nt, Artificial Sequence
  Description of Artificial Sequence:  Enzymatic Nucleic Acid
  misc_feature (31)..(31): n stands for inosine
ggaagcuucugaugaggccguuaggccgaanuccaaaa

SEQ ID NO: 9790 - RNA, 38 nt, Artificial Sequence
  Description of Artificial Sequence:  Enzymatic Nucleic Acid
  misc_feature (31)..(31): n stands for inosine
ugguuggacugaugaggccguuaggccgaancuuuguc

SEQ ID NO: 9791 - RNA, 38 nt, Artificial Sequence
  Description of Artificial Sequence:  Enzymatic Nucleic Acid
  misc_feature (31)..(31): n stands for inosine
uccugguucugaugaggccguuaggccgaanaagcuuu

SEQ ID NO: 9792 - RNA, 38 nt, Artificial Sequence
  Description of Artificial Sequence:  Enzymatic Nucleic Acid
  misc_feature (31)..(31): n stands for inosine
auccuggucugaugaggccguuaggccgaangaagcuu

SEQ ID NO: 9793 - RNA, 38 nt, Artificial Sequence
  Description of Artificial Sequence:  Enzymatic Nucleic Acid
  misc_feature (31)..(31): n stands for inosine
cguauccucugaugaggccguuaggccgaanuuggaag

SEQ ID NO: 9794 - RNA, 38 nt, Artificial Sequence
  Description of Artificial Sequence:  Enzymatic Nucleic Acid
  misc_feature (31)..(31): n stands for inosine
ccguaucccugaugaggccguuaggccgaanguuggaa

SEQ ID NO: 9795 - RNA, 38 nt, Artificial Sequence
  Description of Artificial Sequence:  Enzymatic Nucleic Acid
  misc_feature (31)..(31): n stands for inosine
agaucacccugaugaggccguuaggccgaanccauuuc

SEQ ID NO: 9796 - RNA, 38 nt, Artificial Sequence
  Description of Artificial Sequence:  Enzymatic Nucleic Acid
  misc_feature (31)..(31): n stands for inosine
cugcugaacugaugaggccguuaggccgaanaucacca

SEQ ID NO: 9797 - RNA, 38 nt, Artificial Sequence
  Description of Artificial Sequence:  Enzymatic Nucleic Acid
  misc_feature (31)..(31): n stands for inosine
aaaccugccugaugaggccguuaggccgaanaaagauc

SEQ ID NO: 9798 - RNA, 38 nt, Artificial Sequence
  Description of Artificial Sequence:  Enzymatic Nucleic Acid
  misc_feature (31)..(31): n stands for inosine
aagaaacccugaugaggccguuaggccgaancugaaag

SEQ ID NO: 9799 - RNA, 38 nt, Artificial Sequence
  Description of Artificial Sequence:  Enzymatic Nucleic Acid
  misc_feature (31)..(31): n stands for inosine
cuccaugacugaugaggccguuaggccgaanaaaccug

SEQ ID NO: 9800 - RNA, 38 nt, Artificial Sequence
  Description of Artificial Sequence:  Enzymatic Nucleic Acid
  misc_feature (31)..(31): n stands for inosine
uuccuccacugaugaggccguuaggccgaanaagaaac

SEQ ID NO: 9801 - RNA, 38 nt, Artificial Sequence
  Description of Artificial Sequence:  Enzymatic Nucleic Acid
  misc_feature (31)..(31): n stands for inosine
auguauuacugaugaggccguuaggccgaanuuccucc

SEQ ID NO: 9802 - RNA, 38 nt, Artificial Sequence
  Description of Artificial Sequence:  Enzymatic Nucleic Acid
  misc_feature (31)..(31): n stands for inosine
ugacgguacugaugaggccguuaggccgaanuauuaag

SEQ ID NO: 9803 - RNA, 38 nt, Artificial Sequence
  Description of Artificial Sequence:  Enzymatic Nucleic Acid
  misc_feature (31)..(31): n stands for inosine
cuucugaccugaugaggccguuaggccgaanuauguau

SEQ ID NO: 9804 - RNA, 38 nt, Artificial Sequence
  Description of Artificial Sequence:  Enzymatic Nucleic Acid
  misc_feature (31)..(31): n stands for inosine
ccugcuuccugaugaggccguuaggccgaanacgguau

SEQ ID NO: 9805 - RNA, 38 nt, Artificial Sequence
  Description of Artificial Sequence:  Enzymatic Nucleic Acid
  misc_feature (31)..(31): n stands for inosine
cuacuccccugaugaggccguuaggccgaancuucuga

SEQ ID NO: 9806 - RNA, 38 nt, Artificial Sequence
  Description of Artificial Sequence:  Enzymatic Nucleic Acid
  misc_feature (31)..(31): n stands for inosine
gauauuuacugaugaggccguuaggccgaanuacuacu

SEQ ID NO: 9807 - RNA, 38 nt, Artificial Sequence
  Description of Artificial Sequence:  Enzymatic Nucleic Acid
  misc_feature (31)..(31): n stands for inosine
gcaguucucugaugaggccguuaggccgaanauauuua

SEQ ID NO: 9808 - RNA, 38 nt, Artificial Sequence
  Description of Artificial Sequence:  Enzymatic Nucleic Acid
  misc_feature (31)..(31): n stands for inosine
aauuaggccugaugaggccguuaggccgaanuucuuga

SEQ ID NO: 9809 - RNA, 38 nt, Artificial Sequence
  Description of Artificial Sequence:  Enzymatic Nucleic Acid
  misc_feature (31)..(31): n stands for inosine
cugaauuacugaugaggccguuaggccgaancaguucu

SEQ ID NO: 9810 - RNA, 38 nt, Artificial Sequence
  Description of Artificial Sequence:  Enzymatic Nucleic Acid
  misc_feature (31)..(31): n stands for inosine
ccugaauucugaugaggccguuaggccgaangcaguuc

SEQ ID NO: 9811 - RNA, 38 nt, Artificial Sequence
  Description of Artificial Sequence:  Enzymatic Nucleic Acid
  misc_feature (31)..(31): n stands for inosine
ggaggucccugaugaggccguuaggccgaanaauuagg

SEQ ID NO: 9812 - RNA, 38 nt, Artificial Sequence
  Description of Artificial Sequence:  Enzymatic Nucleic Acid
  misc_feature (31)..(31): n stands for inosine
cauguggacugaugaggccguuaggccgaanuccugaa

SEQ ID NO: 9813 - RNA, 38 nt, Artificial Sequence
  Description of Artificial Sequence:  Enzymatic Nucleic Acid
  misc_feature (31)..(31): n stands for inosine
ucauguggcugaugaggccguuaggccgaanguccuga

SEQ ID NO: 9814 - RNA, 38 nt, Artificial Sequence
  Description of Artificial Sequence:  Enzymatic Nucleic Acid
  misc_feature (31)..(31): n stands for inosine
uaucaugucugaugaggccguuaggccgaanagguccu

SEQ ID NO: 9815 - RNA, 38 nt, Artificial Sequence
  Description of Artificial Sequence:  Enzymatic Nucleic Acid
  misc_feature (31)..(31): n stands for inosine
cuaucaugcugaugaggccguuaggccgaangaggucc

SEQ ID NO: 9816 - RNA, 38 nt, Artificial Sequence
  Description of Artificial Sequence:  Enzymatic Nucleic Acid
  misc_feature (31)..(31): n stands for inosine
uccuaucacugaugaggccguuaggccgaanuggaggu

SEQ ID NO: 9817 - RNA, 38 nt, Artificial Sequence
  Description of Artificial Sequence:  Enzymatic Nucleic Acid
  misc_feature (31)..(31): n stands for inosine
acuugaaacugaugaggccguuaggccgaanuaaaccu

SEQ ID NO: 9818 - RNA, 38 nt, Artificial Sequence
  Description of Artificial Sequence:  Enzymatic Nucleic Acid
  misc_feature (31)..(31): n stands for inosine
uuauaacucugaugaggccguuaggccgaanaaaugua

SEQ ID NO: 9819 - RNA, 38 nt, Artificial Sequence
  Description of Artificial Sequence:  Enzymatic Nucleic Acid
  misc_feature (31)..(31): n stands for inosine
caccuucucugaugaggccguuaggccgaanaaauucu

SEQ ID NO: 9820 - RNA, 38 nt, Artificial Sequence
  Description of Artificial Sequence:  Enzymatic Nucleic Acid
  misc_feature (31)..(31): n stands for inosine
ucaccuuccugaugaggccguuaggccgaangaaauuc

SEQ ID NO: 9821 - RNA, 38 nt, Artificial Sequence
  Description of Artificial Sequence:  Enzymatic Nucleic Acid
  misc_feature (31)..(31): n stands for inosine
uccuucuucugaugaggccguuaggccgaanaucuacc

SEQ ID NO: 9822 - RNA, 38 nt, Artificial Sequence
  Description of Artificial Sequence:  Enzymatic Nucleic Acid
  misc_feature (31)..(31): n stands for inosine
gcauuuuucugaugaggccguuaggccgaancuuccuu

SEQ ID NO: 9823 - RNA, 38 nt, Artificial Sequence
  Description of Artificial Sequence:  Enzymatic Nucleic Acid
  misc_feature (31)..(31): n stands for inosine
uuggcugccugaugaggccguuaggccgaancauuuuu

SEQ ID NO: 9824 - RNA, 38 nt, Artificial Sequence
  Description of Artificial Sequence:  Enzymatic Nucleic Acid
  misc_feature (31)..(31): n stands for inosine
aauuuggccugaugaggccguuaggccgaancggcauu

SEQ ID NO: 9825 - RNA, 38 nt, Artificial Sequence
  Description of Artificial Sequence:  Enzymatic Nucleic Acid
  misc_feature (31)..(31): n stands for inosine
gcuaauuucugaugaggccguuaggccgaancugcggc

SEQ ID NO: 9826 - RNA, 38 nt, Artificial Sequence
  Description of Artificial Sequence:  Enzymatic Nucleic Acid
  misc_feature (31)..(31): n stands for inosine
agcuaauucugaugaggccguuaggccgaangcugcgg

SEQ ID NO: 9827 - RNA, 38 nt, Artificial Sequence
  Description of Artificial Sequence:  Enzymatic Nucleic Acid
  misc_feature (31)..(31): n stands for inosine
aucucaaccugaugaggccguuaggccgaancuaauuu

SEQ ID NO: 9828 - RNA, 38 nt, Artificial Sequence
  Description of Artificial Sequence:  Enzymatic Nucleic Acid
  misc_feature (31)..(31): n stands for inosine
ccuuauuacugaugaggccguuaggccgaanuaucuca

SEQ ID NO: 9829 - RNA, 38 nt, Artificial Sequence
  Description of Artificial Sequence:  Enzymatic Nucleic Acid
  misc_feature (31)..(31): n stands for inosine
ggacuaaccugaugaggccguuaggccgaanccuucuu

SEQ ID NO: 9830 - RNA, 38 nt, Artificial Sequence
  Description of Artificial Sequence:  Enzymatic Nucleic Acid
  misc_feature (31)..(31): n stands for inosine
auaauaaacugaugaggccguuaggccgaanacuaacu

SEQ ID NO: 9831 - RNA, 38 nt, Artificial Sequence
  Description of Artificial Sequence:  Enzymatic Nucleic Acid
  misc_feature (31)..(31): n stands for inosine
aauaauaacugaugaggccguuaggccgaangacuaac

SEQ ID NO: 9832 - RNA, 38 nt, Artificial Sequence
  Description of Artificial Sequence:  Enzymatic Nucleic Acid
  misc_feature (31)..(31): n stands for inosine
uucguugucugaugaggccguuaggccgaanucaauaa

SEQ ID NO: 9833 - RNA, 38 nt, Artificial Sequence
  Description of Artificial Sequence:  Enzymatic Nucleic Acid
  misc_feature (31)..(31): n stands for inosine
gaauucgucugaugaggccguuaggccgaanuugucaa

SEQ ID NO: 9834 - RNA, 38 nt, Artificial Sequence
  Description of Artificial Sequence:  Enzymatic Nucleic Acid
  misc_feature (31)..(31): n stands for inosine
ccuucugacugaugaggccguuaggccgaanaauucgu

SEQ ID NO: 9835 - RNA, 38 nt, Artificial Sequence
  Description of Artificial Sequence:  Enzymatic Nucleic Acid
  misc_feature (31)..(31): n stands for inosine
aauccuuccugaugaggccguuaggccgaanaagaauu

SEQ ID NO: 9836 - RNA, 38 nt, Artificial Sequence
  Description of Artificial Sequence:  Enzymatic Nucleic Acid
  misc_feature (31)..(31): n stands for inosine
uuccccaucugaugaggccguuaggccgaanauaaucc

SEQ ID NO: 9837 - RNA, 38 nt, Artificial Sequence
  Description of Artificial Sequence:  Enzymatic Nucleic Acid
  misc_feature (31)..(31): n stands for inosine
auuccccacugaugaggccguuaggccgaangauaauc

SEQ ID NO: 9838 - RNA, 38 nt, Artificial Sequence
  Description of Artificial Sequence:  Enzymatic Nucleic Acid
  misc_feature (31)..(31): n stands for inosine
aaggccuacugaugaggccguuaggccgaanuaauucc

SEQ ID NO: 9839 - RNA, 38 nt, Artificial Sequence
  Description of Artificial Sequence:  Enzymatic Nucleic Acid
  misc_feature (31)..(31): n stands for inosine
auugauaacugaugaggccguuaggccgaanccuaugu

SEQ ID NO: 9840 - RNA, 38 nt, Artificial Sequence
  Description of Artificial Sequence:  Enzymatic Nucleic Acid
  misc_feature (31)..(31): n stands for inosine
uauugauacugaugaggccguuaggccgaangccuaug

SEQ ID NO: 9841 - RNA, 38 nt, Artificial Sequence
  Description of Artificial Sequence:  Enzymatic Nucleic Acid
  misc_feature (31)..(31): n stands for inosine
aauucuaucugaugaggccguuaggccgaanauaaggc

SEQ ID NO: 9842 - RNA, 38 nt, Artificial Sequence
  Description of Artificial Sequence:  Enzymatic Nucleic Acid
  misc_feature (31)..(31): n stands for inosine
uucuucugcugaugaggccguuaggccgaancaauucu

SEQ ID NO: 9843 - RNA, 38 nt, Artificial Sequence
  Description of Artificial Sequence:  Enzymatic Nucleic Acid
  misc_feature (31)..(31): n stands for inosine
uuucuucucugaugaggccguuaggccgaangcaauuc

SEQ ID NO: 9844 - RNA, 38 nt, Artificial Sequence
  Description of Artificial Sequence:  Enzymatic Nucleic Acid
  misc_feature (31)..(31): n stands for inosine
uuuucuuccugaugaggccguuaggccgaanggcaauu

SEQ ID NO: 9845 - RNA, 38 nt, Artificial Sequence
  Description of Artificial Sequence:  Enzymatic Nucleic Acid
  misc_feature (31)..(31): n stands for inosine
uuacaguucugaugaggccguuaggccgaanucuuuuc

SEQ ID NO: 9846 - RNA, 38 nt, Artificial Sequence
  Description of Artificial Sequence:  Enzymatic Nucleic Acid
  misc_feature (31)..(31): n stands for inosine
uaauuuaccugaugaggccguuaggccgaanuuagucu

SEQ ID NO: 9847 - RNA, 38 nt, Artificial Sequence
  Description of Artificial Sequence:  Enzymatic Nucleic Acid
  misc_feature (31)..(31): n stands for inosine
augcacaccugaugaggccguuaggccgaanuucauaa

SEQ ID NO: 9848 - RNA, 38 nt, Artificial Sequence
  Description of Artificial Sequence:  Enzymatic Nucleic Acid
  misc_feature (31)..(31): n stands for inosine
acccccgacugaugaggccguuaggccgaancacacug

SEQ ID NO: 9849 - RNA, 38 nt, Artificial Sequence
  Description of Artificial Sequence:  Enzymatic Nucleic Acid
  misc_feature (31)..(31): n stands for inosine
cuggcccacugaugaggccguuaggccgaancaccccc

SEQ ID NO: 9850 - RNA, 38 nt, Artificial Sequence
  Description of Artificial Sequence:  Enzymatic Nucleic Acid
  misc_feature (31)..(31): n stands for inosine
auccuucucugaugaggccguuaggccgaancccaugc

SEQ ID NO: 9851 - RNA, 38 nt, Artificial Sequence
  Description of Artificial Sequence:  Enzymatic Nucleic Acid
  misc_feature (31)..(31): n stands for inosine
aauccuuccugaugaggccguuaggccgaangcccaug

SEQ ID NO: 9852 - RNA, 38 nt, Artificial Sequence
  Description of Artificial Sequence:  Enzymatic Nucleic Acid
  misc_feature (31)..(31): n stands for inosine
auuuauaacugaugaggccguuaggccgaanaaauccu

SEQ ID NO: 9853 - RNA, 38 nt, Artificial Sequence
  Description of Artificial Sequence:  Enzymatic Nucleic Acid
  misc_feature (31)..(31): n stands for inosine
ucccauuucugaugaggccguuaggccgaancauuuau

SEQ ID NO: 9854 - RNA, 38 nt, Artificial Sequence
  Description of Artificial Sequence:  Enzymatic Nucleic Acid
  misc_feature (31)..(31): n stands for inosine
auucuuuccugaugaggccguuaggccgaanucccauu

SEQ ID NO: 9855 - RNA, 38 nt, Artificial Sequence
  Description of Artificial Sequence:  Enzymatic Nucleic Acid
  misc_feature (31)..(31): n stands for inosine
guagaacccugaugaggccguuaggccgaanuaccaau

SEQ ID NO: 9856 - RNA, 38 nt, Artificial Sequence
  Description of Artificial Sequence:  Enzymatic Nucleic Acid
  misc_feature (31)..(31): n stands for inosine
uguuuagucugaugaggccguuaggccgaanaaccugu

SEQ ID NO: 9857 - RNA, 38 nt, Artificial Sequence
  Description of Artificial Sequence:  Enzymatic Nucleic Acid
  misc_feature (31)..(31): n stands for inosine
uccuguuucugaugaggccguuaggccgaanuagaacc

SEQ ID NO: 9858 - RNA, 38 nt, Artificial Sequence
  Description of Artificial Sequence:  Enzymatic Nucleic Acid
  misc_feature (31)..(31): n stands for inosine
uugcuucccugaugaggccguuaggccgaanuuuagua

SEQ ID NO: 9859 - RNA, 38 nt, Artificial Sequence
  Description of Artificial Sequence:  Enzymatic Nucleic Acid
  misc_feature (31)..(31): n stands for inosine
aauuguuucugaugaggccguuaggccgaancuuccug

SEQ ID NO: 9860 - RNA, 38 nt, Artificial Sequence
  Description of Artificial Sequence:  Enzymatic Nucleic Acid
  misc_feature (31)..(31): n stands for inosine
cggccaaucugaugaggccguuaggccgaanuuuugcu

SEQ ID NO: 9861 - RNA, 38 nt, Artificial Sequence
  Description of Artificial Sequence:  Enzymatic Nucleic Acid
  misc_feature (31)..(31): n stands for inosine
aguuuagccugaugaggccguuaggccgaanccaauug

SEQ ID NO: 9862 - RNA, 38 nt, Artificial Sequence
  Description of Artificial Sequence:  Enzymatic Nucleic Acid
  misc_feature (31)..(31): n stands for inosine
gcaaguuucugaugaggccguuaggccgaancggccaa

SEQ ID NO: 9863 - RNA, 38 nt, Artificial Sequence
  Description of Artificial Sequence:  Enzymatic Nucleic Acid
  misc_feature (31)..(31): n stands for inosine
gauaugcacugaugaggccguuaggccgaanuuuagcg

SEQ ID NO: 9864 - RNA, 38 nt, Artificial Sequence
  Description of Artificial Sequence:  Enzymatic Nucleic Acid
  misc_feature (31)..(31): n stands for inosine
ugaagauacugaugaggccguuaggccgaancaaguuu

SEQ ID NO: 9865 - RNA, 38 nt, Artificial Sequence
  Description of Artificial Sequence:  Enzymatic Nucleic Acid
  misc_feature (31)..(31): n stands for inosine
auaucugacugaugaggccguuaggccgaanauaugca

SEQ ID NO: 9866 - RNA, 38 nt, Artificial Sequence
  Description of Artificial Sequence:  Enzymatic Nucleic Acid
  misc_feature (31)..(31): n stands for inosine
auaauauccugaugaggccguuaggccgaanaagauau

SEQ ID NO: 9867 - RNA, 38 nt, Artificial Sequence
  Description of Artificial Sequence:  Enzymatic Nucleic Acid
  misc_feature (31)..(31): n stands for inosine
guuucuuccugaugaggccguuaggccgaanauaauau

SEQ ID NO: 9868 - RNA, 38 nt, Artificial Sequence
  Description of Artificial Sequence:  Enzymatic Nucleic Acid
  misc_feature (31)..(31): n stands for inosine
uucacugacugaugaggccguuaggccgaanuuucuuc

SEQ ID NO: 9869 - RNA, 38 nt, Artificial Sequence
  Description of Artificial Sequence:  Enzymatic Nucleic Acid
  misc_feature (31)..(31): n stands for inosine
uuucacugcugaugaggccguuaggccgaanguuucuu

SEQ ID NO: 9870 - RNA, 38 nt, Artificial Sequence
  Description of Artificial Sequence:  Enzymatic Nucleic Acid
  misc_feature (31)..(31): n stands for inosine
gauuucaccugaugaggccguuaggccgaanagguuuc

SEQ ID NO: 9871 - RNA, 38 nt, Artificial Sequence
  Description of Artificial Sequence:  Enzymatic Nucleic Acid
  misc_feature (31)..(31): n stands for inosine
agguaguccugaugaggccguuaggccgaanauuucac

SEQ ID NO: 9872 - RNA, 38 nt, Artificial Sequence
  Description of Artificial Sequence:  Enzymatic Nucleic Acid
  misc_feature (31)..(31): n stands for inosine
ggacaggucugaugaggccguuaggccgaanucagauu

SEQ ID NO: 9873 - RNA, 38 nt, Artificial Sequence
  Description of Artificial Sequence:  Enzymatic Nucleic Acid
  misc_feature (31)..(31): n stands for inosine
agaggacacugaugaggccguuaggccgaanuagucag

SEQ ID NO: 9874 - RNA, 38 nt, Artificial Sequence
  Description of Artificial Sequence:  Enzymatic Nucleic Acid
  misc_feature (31)..(31): n stands for inosine
cagaggaccugaugaggccguuaggccgaanguaguca

SEQ ID NO: 9875 - RNA, 38 nt, Artificial Sequence
  Description of Artificial Sequence:  Enzymatic Nucleic Acid
  misc_feature (31)..(31): n stands for inosine
gaaccagacugaugaggccguuaggccgaanacaggua

SEQ ID NO: 9876 - RNA, 38 nt, Artificial Sequence
  Description of Artificial Sequence:  Enzymatic Nucleic Acid
  misc_feature (31)..(31): n stands for inosine
agaaccagcugaugaggccguuaggccgaangacaggu

SEQ ID NO: 9877 - RNA, 38 nt, Artificial Sequence
  Description of Artificial Sequence:  Enzymatic Nucleic Acid
  misc_feature (31)..(31): n stands for inosine
aaagaacccugaugaggccguuaggccgaanaggacag

SEQ ID NO: 9878 - RNA, 38 nt, Artificial Sequence
  Description of Artificial Sequence:  Enzymatic Nucleic Acid
  misc_feature (31)..(31): n stands for inosine
guagcaaacugaugaggccguuaggccgaanaaccaga

SEQ ID NO: 9879 - RNA, 38 nt, Artificial Sequence
  Description of Artificial Sequence:  Enzymatic Nucleic Acid
  misc_feature (31)..(31): n stands for inosine
cacguagucugaugaggccguuaggccgaancaaaaga

SEQ ID NO: 9880 - RNA, 38 nt, Artificial Sequence
  Description of Artificial Sequence:  Enzymatic Nucleic Acid
  misc_feature (31)..(31): n stands for inosine
ucacacgucugaugaggccguuaggccgaanuagcaaa

SEQ ID NO: 9881 - RNA, 38 nt, Artificial Sequence
  Description of Artificial Sequence:  Enzymatic Nucleic Acid
  misc_feature (31)..(31): n stands for inosine
uugcuuugcugaugaggccguuaggccgaanacucaca

SEQ ID NO: 9882 - RNA, 38 nt, Artificial Sequence
  Description of Artificial Sequence:  Enzymatic Nucleic Acid
  misc_feature (31)..(31): n stands for inosine
guugcuuucugaugaggccguuaggccgaangacucac

SEQ ID NO: 9883 - RNA, 38 nt, Artificial Sequence
  Description of Artificial Sequence:  Enzymatic Nucleic Acid
  misc_feature (31)..(31): n stands for inosine
aguugcuucugaugaggccguuaggccgaanggacuca

SEQ ID NO: 9884 - RNA, 38 nt, Artificial Sequence
  Description of Artificial Sequence:  Enzymatic Nucleic Acid
  misc_feature (31)..(31): n stands for inosine
uaaagagucugaugaggccguuaggccgaancuuuggg

SEQ ID NO: 9885 - RNA, 38 nt, Artificial Sequence
  Description of Artificial Sequence:  Enzymatic Nucleic Acid
  misc_feature (31)..(31): n stands for inosine
cacuaaagcugaugaggccguuaggccgaanuugcuuu

SEQ ID NO: 9886 - RNA, 38 nt, Artificial Sequence
  Description of Artificial Sequence:  Enzymatic Nucleic Acid
  misc_feature (31)..(31): n stands for inosine
gucacuaacugaugaggccguuaggccgaanaguugcu

SEQ ID NO: 9887 - RNA, 38 nt, Artificial Sequence
  Description of Artificial Sequence:  Enzymatic Nucleic Acid
  misc_feature (31)..(31): n stands for inosine
agugugcucugaugaggccguuaggccgaanucacuaa

SEQ ID NO: 9888 - RNA, 38 nt, Artificial Sequence
  Description of Artificial Sequence:  Enzymatic Nucleic Acid
  misc_feature (31)..(31): n stands for inosine
gagugugccugaugaggccguuaggccgaangucacua

SEQ ID NO: 9889 - RNA, 38 nt, Artificial Sequence
  Description of Artificial Sequence:  Enzymatic Nucleic Acid
  misc_feature (31)..(31): n stands for inosine
agcgagugcugaugaggccguuaggccgaancugguca

SEQ ID NO: 9890 - RNA, 38 nt, Artificial Sequence
  Description of Artificial Sequence:  Enzymatic Nucleic Acid
  misc_feature (31)..(31): n stands for inosine
gaagcgagcugaugaggccguuaggccgaanugcuggu

SEQ ID NO: 9891 - RNA, 38 nt, Artificial Sequence
  Description of Artificial Sequence:  Enzymatic Nucleic Acid
  misc_feature (31)..(31): n stands for inosine
cagaagcgcugaugaggccguuaggccgaanugugcug

SEQ ID NO: 9892 - RNA, 38 nt, Artificial Sequence
  Description of Artificial Sequence:  Enzymatic Nucleic Acid
  misc_feature (31)..(31): n stands for inosine
gauucagacugaugaggccguuaggccgaancgagugu

SEQ ID NO: 9893 - RNA, 38 nt, Artificial Sequence
  Description of Artificial Sequence:  Enzymatic Nucleic Acid
  misc_feature (31)..(31): n stands for inosine
gaugauuccugaugaggccguuaggccgaanaagcgag

SEQ ID NO: 9894 - RNA, 38 nt, Artificial Sequence
  Description of Artificial Sequence:  Enzymatic Nucleic Acid
  misc_feature (31)..(31): n stands for inosine
ucagaugacugaugaggccguuaggccgaanauucaga

SEQ ID NO: 9895 - RNA, 38 nt, Artificial Sequence
  Description of Artificial Sequence:  Enzymatic Nucleic Acid
  misc_feature (31)..(31): n stands for inosine
ccuucagacugaugaggccguuaggccgaanaugauuc

SEQ ID NO: 9896 - RNA, 38 nt, Artificial Sequence
  Description of Artificial Sequence:  Enzymatic Nucleic Acid
  misc_feature (31)..(31): n stands for inosine
ucaccuuccugaugaggccguuaggccgaanaugauga

SEQ ID NO: 9897 - RNA, 38 nt, Artificial Sequence
  Description of Artificial Sequence:  Enzymatic Nucleic Acid
  misc_feature (31)..(31): n stands for inosine
ugcugagacugaugaggccguuaggccgaanucaccuu

SEQ ID NO: 9898 - RNA, 38 nt, Artificial Sequence
  Description of Artificial Sequence:  Enzymatic Nucleic Acid
  misc_feature (31)..(31): n stands for inosine
aucugcugcugaugaggccguuaggccgaanaagucac

SEQ ID NO: 9899 - RNA, 38 nt, Artificial Sequence
  Description of Artificial Sequence:  Enzymatic Nucleic Acid
  misc_feature (31)..(31): n stands for inosine
guaucugccugaugaggccguuaggccgaanagaaguc

SEQ ID NO: 9900 - RNA, 38 nt, Artificial Sequence
  Description of Artificial Sequence:  Enzymatic Nucleic Acid
  misc_feature (31)..(31): n stands for inosine
gauguauccugaugaggccguuaggccgaancugagaa

SEQ ID NO: 9901 - RNA, 38 nt, Artificial Sequence
  Description of Artificial Sequence:  Enzymatic Nucleic Acid
  misc_feature (31)..(31): n stands for inosine
aucucugacugaugaggccguuaggccgaanuaucugc

SEQ ID NO: 9902 - RNA, 38 nt, Artificial Sequence
  Description of Artificial Sequence:  Enzymatic Nucleic Acid
  misc_feature (31)..(31): n stands for inosine
uuuaucuccugaugaggccguuaggccgaanauguauc

SEQ ID NO: 9903 - RNA, 38 nt, Artificial Sequence
  Description of Artificial Sequence:  Enzymatic Nucleic Acid
  misc_feature (31)..(31): n stands for inosine
ucacuguucugaugaggccguuaggccgaanaauuuau

SEQ ID NO: 9904 - RNA, 38 nt, Artificial Sequence
  Description of Artificial Sequence:  Enzymatic Nucleic Acid
  misc_feature (31)..(31): n stands for inosine
acugucaccugaugaggccguuaggccgaanuuagaau

SEQ ID NO: 9905 - RNA, 38 nt, Artificial Sequence
  Description of Artificial Sequence:  Enzymatic Nucleic Acid
  misc_feature (31)..(31): n stands for inosine
guuuaaaccugaugaggccguuaggccgaanucacugu

SEQ ID NO: 9906 - RNA, 38 nt, Artificial Sequence
  Description of Artificial Sequence:  Enzymatic Nucleic Acid
  misc_feature (31)..(31): n stands for inosine
cgaagaaccugaugaggccguuaggccgaanuuuaaac

SEQ ID NO: 9907 - RNA, 38 nt, Artificial Sequence
  Description of Artificial Sequence:  Enzymatic Nucleic Acid
  misc_feature (31)..(31): n stands for inosine
agcaacgacugaugaggccguuaggccgaanaacuguu

SEQ ID NO: 9908 - RNA, 38 nt, Artificial Sequence
  Description of Artificial Sequence:  Enzymatic Nucleic Acid
  misc_feature (31)..(31): n stands for inosine
cauucauacugaugaggccguuaggccgaancaacgaa

SEQ ID NO: 9909 - RNA, 38 nt, Artificial Sequence
  Description of Artificial Sequence:  Enzymatic Nucleic Acid
  misc_feature (31)..(31): n stands for inosine
uauuucugcugaugaggccguuaggccgaanaccauuc

SEQ ID NO: 9910 - RNA, 38 nt, Artificial Sequence
  Description of Artificial Sequence:  Enzymatic Nucleic Acid
  misc_feature (31)..(31): n stands for inosine
auuauuuccugaugaggccguuaggccgaanagaccau

SEQ ID NO: 9911 - RNA, 38 nt, Artificial Sequence
  Description of Artificial Sequence:  Enzymatic Nucleic Acid
  misc_feature (31)..(31): n stands for inosine
ccuuccuucugaugaggccguuaggccgaanauuauuu

SEQ ID NO: 9912 - RNA, 38 nt, Artificial Sequence
  Description of Artificial Sequence:  Enzymatic Nucleic Acid
  misc_feature (31)..(31): n stands for inosine
gaucuuuucugaugaggccguuaggccgaanccuuccu

SEQ ID NO: 9913 - RNA, 38 nt, Artificial Sequence
  Description of Artificial Sequence:  Enzymatic Nucleic Acid
  misc_feature (31)..(31): n stands for inosine
ggugccaacugaugaggccguuaggccgaanaucuuuu

SEQ ID NO: 9914 - RNA, 38 nt, Artificial Sequence
  Description of Artificial Sequence:  Enzymatic Nucleic Acid
  misc_feature (31)..(31): n stands for inosine
aaucugggcugaugaggccguuaggccgaanccaaaga

SEQ ID NO: 9915 - RNA, 38 nt, Artificial Sequence
  Description of Artificial Sequence:  Enzymatic Nucleic Acid
  misc_feature (31)..(31): n stands for inosine
caaaucugcugaugaggccguuaggccgaanugccaaa

SEQ ID NO: 9916 - RNA, 38 nt, Artificial Sequence
  Description of Artificial Sequence:  Enzymatic Nucleic Acid
  misc_feature (31)..(31): n stands for inosine
ucaaaucucugaugaggccguuaggccgaangugccaa

SEQ ID NO: 9917 - RNA, 38 nt, Artificial Sequence
  Description of Artificial Sequence:  Enzymatic Nucleic Acid
  misc_feature (31)..(31): n stands for inosine
gucaaauccugaugaggccguuaggccgaanggugcca

SEQ ID NO: 9918 - RNA, 38 nt, Artificial Sequence
  Description of Artificial Sequence:  Enzymatic Nucleic Acid
  misc_feature (31)..(31): n stands for inosine
gucaggaacugaugaggccguuaggccgaanucaaauc

SEQ ID NO: 9919 - RNA, 38 nt, Artificial Sequence
  Description of Artificial Sequence:  Enzymatic Nucleic Acid
  misc_feature (31)..(31): n stands for inosine
ugucaggacugaugaggccguuaggccgaangucaaau

SEQ ID NO: 9920 - RNA, 38 nt, Artificial Sequence
  Description of Artificial Sequence:  Enzymatic Nucleic Acid
  misc_feature (31)..(31): n stands for inosine
ucaugucacugaugaggccguuaggccgaanaagguca

SEQ ID NO: 9921 - RNA, 38 nt, Artificial Sequence
  Description of Artificial Sequence:  Enzymatic Nucleic Acid
  misc_feature (31)..(31): n stands for inosine
uucauguccugaugaggccguuaggccgaangaagguc

SEQ ID NO: 9922 - RNA, 38 nt, Artificial Sequence
  Description of Artificial Sequence:  Enzymatic Nucleic Acid
  misc_feature (31)..(31): n stands for inosine
uucuuucacugaugaggccguuaggccgaanucaggaa

SEQ ID NO: 9923 - RNA, 38 nt, Artificial Sequence
  Description of Artificial Sequence:  Enzymatic Nucleic Acid
  misc_feature (31)..(31): n stands for inosine
guauacuucugaugaggccguuaggccgaanuuucuuu

SEQ ID NO: 9924 - RNA, 38 nt, Artificial Sequence
  Description of Artificial Sequence:  Enzymatic Nucleic Acid
  misc_feature (31)..(31): n stands for inosine
uuguccaccugaugaggccguuaggccgaanuauacuu

SEQ ID NO: 9925 - RNA, 38 nt, Artificial Sequence
  Description of Artificial Sequence:  Enzymatic Nucleic Acid
  misc_feature (31)..(31): n stands for inosine
aaaccucucugaugaggccguuaggccgaanuccacag

SEQ ID NO: 9926 - RNA, 38 nt, Artificial Sequence
  Description of Artificial Sequence:  Enzymatic Nucleic Acid
  misc_feature (31)..(31): n stands for inosine
aaaauccacugaugaggccguuaggccgaanccaaacc

SEQ ID NO: 9927 - RNA, 38 nt, Artificial Sequence
  Description of Artificial Sequence:  Enzymatic Nucleic Acid
  misc_feature (31)..(31): n stands for inosine
uccaccugcugaugaggccguuaggccgaanccaauua

SEQ ID NO: 9928 - RNA, 38 nt, Artificial Sequence
  Description of Artificial Sequence:  Enzymatic Nucleic Acid
  misc_feature (31)..(31): n stands for inosine
aauccacccugaugaggccguuaggccgaanagccaau

SEQ ID NO: 9929 - RNA, 38 nt, Artificial Sequence
  Description of Artificial Sequence:  Enzymatic Nucleic Acid
  misc_feature (31)..(31): n stands for inosine
gaaaacuucugaugaggccguuaggccgaanccaaauc

SEQ ID NO: 9930 - RNA, 38 nt, Artificial Sequence
  Description of Artificial Sequence:  Enzymatic Nucleic Acid
  misc_feature (31)..(31): n stands for inosine
ugaaaacucugaugaggccguuaggccgaangccaaau

SEQ ID NO: 9931 - RNA, 38 nt, Artificial Sequence
  Description of Artificial Sequence:  Enzymatic Nucleic Acid
  misc_feature (31)..(31): n stands for inosine
uuuugcuucugaugaggccguuaggccgaanaaaacuu

SEQ ID NO: 9932 - RNA, 38 nt, Artificial Sequence
  Description of Artificial Sequence:  Enzymatic Nucleic Acid
  misc_feature (31)..(31): n stands for inosine
cuguguuucugaugaggccguuaggccgaancuuugaa

SEQ ID NO: 9933 - RNA, 38 nt, Artificial Sequence
  Description of Artificial Sequence:  Enzymatic Nucleic Acid
  misc_feature (31)..(31): n stands for inosine
caauucugcugaugaggccguuaggccgaanuuuugcu

SEQ ID NO: 9934 - RNA, 38 nt, Artificial Sequence
  Description of Artificial Sequence:  Enzymatic Nucleic Acid
  misc_feature (31)..(31): n stands for inosine
gucaauuccugaugaggccguuaggccgaanuguuuug

SEQ ID NO: 9935 - RNA, 38 nt, Artificial Sequence
  Description of Artificial Sequence:  Enzymatic Nucleic Acid
  misc_feature (31)..(31): n stands for inosine
auaacguacugaugaggccguuaggccgaanucuuucc

SEQ ID NO: 9936 - RNA, 38 nt, Artificial Sequence
  Description of Artificial Sequence:  Enzymatic Nucleic Acid
  misc_feature (31)..(31): n stands for inosine
uuugccaacugaugaggccguuaggccgaancuuuuac

SEQ ID NO: 9937 - RNA, 38 nt, Artificial Sequence
  Description of Artificial Sequence:  Enzymatic Nucleic Acid
  misc_feature (31)..(31): n stands for inosine
ucaaguuucugaugaggccguuaggccgaanccaaugc

SEQ ID NO: 9938 - RNA, 38 nt, Artificial Sequence
  Description of Artificial Sequence:  Enzymatic Nucleic Acid
  misc_feature (31)..(31): n stands for inosine
caugaucacugaugaggccguuaggccgaanuuuugcc

SEQ ID NO: 9939 - RNA, 38 nt, Artificial Sequence
  Description of Artificial Sequence:  Enzymatic Nucleic Acid
  misc_feature (31)..(31): n stands for inosine
uauuuacacugaugaggccguuaggccgaanaucaagu

SEQ ID NO: 9940 - RNA, 38 nt, Artificial Sequence
  Description of Artificial Sequence:  Enzymatic Nucleic Acid
  misc_feature (31)..(31): n stands for inosine
cauuguagcugaugaggccguuaggccgaanaacaaua

SEQ ID NO: 9941 - RNA, 38 nt, Artificial Sequence
  Description of Artificial Sequence:  Enzymatic Nucleic Acid
  misc_feature (31)..(31): n stands for inosine
gccauugucugaugaggccguuaggccgaanugaacaa

SEQ ID NO: 9942 - RNA, 38 nt, Artificial Sequence
  Description of Artificial Sequence:  Enzymatic Nucleic Acid
  misc_feature (31)..(31): n stands for inosine
acagccaucugaugaggccguuaggccgaanuagugaa

SEQ ID NO: 9943 - RNA, 38 nt, Artificial Sequence
  Description of Artificial Sequence:  Enzymatic Nucleic Acid
  misc_feature (31)..(31): n stands for inosine
aucccaaccugaugaggccguuaggccgaanccauugu

SEQ ID NO: 9944 - RNA, 38 nt, Artificial Sequence
  Description of Artificial Sequence:  Enzymatic Nucleic Acid
  misc_feature (31)..(31): n stands for inosine
uggucucacugaugaggccguuaggccgaanaucauaa

SEQ ID NO: 9945 - RNA, 38 nt, Artificial Sequence
  Description of Artificial Sequence:  Enzymatic Nucleic Acid
  misc_feature (31)..(31): n stands for inosine
cuggucuccugaugaggccguuaggccgaangaucaua

SEQ ID NO: 9946 - RNA, 38 nt, Artificial Sequence
  Description of Artificial Sequence:  Enzymatic Nucleic Acid
  misc_feature (31)..(31): n stands for inosine
ucaucacucugaugaggccguuaggccgaanucucagg

SEQ ID NO: 9947 - RNA, 38 nt, Artificial Sequence
  Description of Artificial Sequence:  Enzymatic Nucleic Acid
  misc_feature (31)..(31): n stands for inosine
aucaucaccugaugaggccguuaggccgaangucucag

SEQ ID NO: 9948 - RNA, 38 nt, Artificial Sequence
  Description of Artificial Sequence:  Enzymatic Nucleic Acid
  misc_feature (31)..(31): n stands for inosine
cucucaagcugaugaggccguuaggccgaanaaucauc

SEQ ID NO: 9949 - RNA, 38 nt, Artificial Sequence
  Description of Artificial Sequence:  Enzymatic Nucleic Acid
  misc_feature (31)..(31): n stands for inosine
ugcucucacugaugaggccguuaggccgaanagaauca

SEQ ID NO: 9950 - RNA, 38 nt, Artificial Sequence
  Description of Artificial Sequence:  Enzymatic Nucleic Acid
  misc_feature (31)..(31): n stands for inosine
auaaucaccugaugaggccguuaggccgaancucucaa

SEQ ID NO: 9951 - RNA, 38 nt, Artificial Sequence
  Description of Artificial Sequence:  Enzymatic Nucleic Acid
  misc_feature (31)..(31): n stands for inosine
uguucucacugaugaggccguuaggccgaanaucauaa

SEQ ID NO: 9952 - RNA, 38 nt, Artificial Sequence
  Description of Artificial Sequence:  Enzymatic Nucleic Acid
  misc_feature (31)..(31): n stands for inosine
cuguucuccugaugaggccguuaggccgaangaucaua

SEQ ID NO: 9953 - RNA, 38 nt, Artificial Sequence
  Description of Artificial Sequence:  Enzymatic Nucleic Acid
  misc_feature (31)..(31): n stands for inosine
auuuuugccugaugaggccguuaggccgaanuucucag

SEQ ID NO: 9954 - RNA, 38 nt, Artificial Sequence
  Description of Artificial Sequence:  Enzymatic Nucleic Acid
  misc_feature (31)..(31): n stands for inosine
acuauuuucugaugaggccguuaggccgaancuguucu

SEQ ID NO: 9955 - RNA, 38 nt, Artificial Sequence
  Description of Artificial Sequence:  Enzymatic Nucleic Acid
  misc_feature (31)..(31): n stands for inosine
uuugaccucugaugaggccguuaggccgaanaacuauu

SEQ ID NO: 9956 - RNA, 38 nt, Artificial Sequence
  Description of Artificial Sequence:  Enzymatic Nucleic Acid
  misc_feature (31)..(31): n stands for inosine
uuagucuucugaugaggccguuaggccgaanaccuuga

SEQ ID NO: 9957 - RNA, 38 nt, Artificial Sequence
  Description of Artificial Sequence:  Enzymatic Nucleic Acid
  misc_feature (31)..(31): n stands for inosine
aggcacuucugaugaggccguuaggccgaanucuuuga

SEQ ID NO: 9958 - RNA, 38 nt, Artificial Sequence
  Description of Artificial Sequence:  Enzymatic Nucleic Acid
  misc_feature (31)..(31): n stands for inosine
gaugaaaacugaugaggccguuaggccgaancacuuag

SEQ ID NO: 9959 - RNA, 38 nt, Artificial Sequence
  Description of Artificial Sequence:  Enzymatic Nucleic Acid
  misc_feature (31)..(31): n stands for inosine
ggaugaaacugaugaggccguuaggccgaangcacuua

SEQ ID NO: 9960 - RNA, 38 nt, Artificial Sequence
  Description of Artificial Sequence:  Enzymatic Nucleic Acid
  misc_feature (31)..(31): n stands for inosine
cauuuggacugaugaggccguuaggccgaanaaaaggc

SEQ ID NO: 9961 - RNA, 38 nt, Artificial Sequence
  Description of Artificial Sequence:  Enzymatic Nucleic Acid
  misc_feature (31)..(31): n stands for inosine
uuccauuucugaugaggccguuaggccgaanaugaaaa

SEQ ID NO: 9962 - RNA, 38 nt, Artificial Sequence
  Description of Artificial Sequence:  Enzymatic Nucleic Acid
  misc_feature (31)..(31): n stands for inosine
auuccauucugaugaggccguuaggccgaangaugaaa

SEQ ID NO: 9963 - RNA, 38 nt, Artificial Sequence
  Description of Artificial Sequence:  Enzymatic Nucleic Acid
  misc_feature (31)..(31): n stands for inosine
uuuaucaccugaugaggccguuaggccgaanaauucca

SEQ ID NO: 9964 - RNA, 38 nt, Artificial Sequence
  Description of Artificial Sequence:  Enzymatic Nucleic Acid
  misc_feature (31)..(31): n stands for inosine
uguuccaacugaugaggccguuaggccgaanucccuuu

SEQ ID NO: 9965 - RNA, 38 nt, Artificial Sequence
  Description of Artificial Sequence:  Enzymatic Nucleic Acid
  misc_feature (31)..(31): n stands for inosine
uuguuccacugaugaggccguuaggccgaangucccuu

SEQ ID NO: 9966 - RNA, 38 nt, Artificial Sequence
  Description of Artificial Sequence:  Enzymatic Nucleic Acid
  misc_feature (31)..(31): n stands for inosine
caauccaucugaugaggccguuaggccgaanuuccaag

SEQ ID NO: 9967 - RNA, 38 nt, Artificial Sequence
  Description of Artificial Sequence:  Enzymatic Nucleic Acid
  misc_feature (31)..(31): n stands for inosine
cuuugucucugaugaggccguuaggccgaanuuucucg

SEQ ID NO: 9968 - RNA, 38 nt, Artificial Sequence
  Description of Artificial Sequence:  Enzymatic Nucleic Acid
  misc_feature (31)..(31): n stands for inosine
caaaacuucugaugaggccguuaggccgaanucuaguu

SEQ ID NO: 9969 - RNA, 38 nt, Artificial Sequence
  Description of Artificial Sequence:  Enzymatic Nucleic Acid
  misc_feature (31)..(31): n stands for inosine
aguuccaacugaugaggccguuaggccgaanccaaaac

SEQ ID NO: 9970 - RNA, 38 nt, Artificial Sequence
  Description of Artificial Sequence:  Enzymatic Nucleic Acid
  misc_feature (31)..(31): n stands for inosine
guucaaagcugaugaggccguuaggccgaanuuccaaa

SEQ ID NO: 9971 - RNA, 38 nt, Artificial Sequence
  Description of Artificial Sequence:  Enzymatic Nucleic Acid
  misc_feature (31)..(31): n stands for inosine
uuguucaacugaugaggccguuaggccgaanaguucca

SEQ ID NO: 9972 - RNA, 38 nt, Artificial Sequence
  Description of Artificial Sequence:  Enzymatic Nucleic Acid
  misc_feature (31)..(31): n stands for inosine
uuguuauucugaugaggccguuaggccgaanuucaaag

SEQ ID NO: 9973 - RNA, 38 nt, Artificial Sequence
  Description of Artificial Sequence:  Enzymatic Nucleic Acid
  misc_feature (31)..(31): n stands for inosine
accccuuucugaugaggccguuaggccgaanuuauuug

SEQ ID NO: 9974 - RNA, 38 nt, Artificial Sequence
  Description of Artificial Sequence:  Enzymatic Nucleic Acid
  misc_feature (31)..(31): n stands for inosine
uuuuugaacugaugaggccguuaggccgaanuauauaa

SEQ ID NO: 9975 - RNA, 38 nt, Artificial Sequence
  Description of Artificial Sequence:  Enzymatic Nucleic Acid
  misc_feature (31)..(31): n stands for inosine
aauuuuuucugaugaggccguuaggccgaanaauguau

SEQ ID NO: 9976 - RNA, 38 nt, Artificial Sequence
  Description of Artificial Sequence:  Enzymatic Nucleic Acid
  misc_feature (31)..(31): n stands for inosine
gaucucuacugaugaggccguuaggccgaanaauuaau

SEQ ID NO: 9977 - RNA, 38 nt, Artificial Sequence
  Description of Artificial Sequence:  Enzymatic Nucleic Acid
  misc_feature (31)..(31): n stands for inosine
uuggcuuacugaugaggccguuaggccgaanaucucua

SEQ ID NO: 9978 - RNA, 38 nt, Artificial Sequence
  Description of Artificial Sequence:  Enzymatic Nucleic Acid
  misc_feature (31)..(31): n stands for inosine
uauuacuucugaugaggccguuaggccgaancuuaaga

SEQ ID NO: 9979 - RNA, 38 nt, Artificial Sequence
  Description of Artificial Sequence:  Enzymatic Nucleic Acid
  misc_feature (31)..(31): n stands for inosine
auauuacucugaugaggccguuaggccgaangcuuaag

SEQ ID NO: 9980 - RNA, 38 nt, Artificial Sequence
  Description of Artificial Sequence:  Enzymatic Nucleic Acid
  misc_feature (31)..(31): n stands for inosine
aucuacuacugaugaggccguuaggccgaanaauauau

SEQ ID NO: 9981 - RNA, 38 nt, Artificial Sequence
  Description of Artificial Sequence:  Enzymatic Nucleic Acid
  misc_feature (31)..(31): n stands for inosine
acuuguuucugaugaggccguuaggccgaanuaucuac

SEQ ID NO: 9982 - RNA, 38 nt, Artificial Sequence
  Description of Artificial Sequence:  Enzymatic Nucleic Acid
  misc_feature (31)..(31): n stands for inosine
ucuuuacucugaugaggccguuaggccgaanuuuugua

SEQ ID NO: 9983 - RNA, 38 nt, Artificial Sequence
  Description of Artificial Sequence:  Enzymatic Nucleic Acid
  misc_feature (31)..(31): n stands for inosine
aaguccaacugaugaggccguuaggccgaanucuccaa

SEQ ID NO: 9984 - RNA, 38 nt, Artificial Sequence
  Description of Artificial Sequence:  Enzymatic Nucleic Acid
  misc_feature (31)..(31): n stands for inosine
auguuacacugaugaggccguuaggccgaanuccaaag

SEQ ID NO: 9985 - RNA, 38 nt, Artificial Sequence
  Description of Artificial Sequence:  Enzymatic Nucleic Acid
  misc_feature (31)..(31): n stands for inosine
uucagagacugaugaggccguuaggccgaanuuacaag

SEQ ID NO: 9986 - RNA, 38 nt, Artificial Sequence
  Description of Artificial Sequence:  Enzymatic Nucleic Acid
  misc_feature (31)..(31): n stands for inosine
uuuuucagcugaugaggccguuaggccgaanauguuac

SEQ ID NO: 9987 - RNA, 38 nt, Artificial Sequence
  Description of Artificial Sequence:  Enzymatic Nucleic Acid
  misc_feature (31)..(31): n stands for inosine
cauuuuuccugaugaggccguuaggccgaanagauguu

SEQ ID NO: 9988 - RNA, 38 nt, Artificial Sequence
  Description of Artificial Sequence:  Enzymatic Nucleic Acid
  misc_feature (31)..(31): n stands for inosine
uuacuccucugaugaggccguuaggccgaanuucgcuu

SEQ ID NO: 9989 - RNA, 38 nt, Artificial Sequence
  Description of Artificial Sequence:  Enzymatic Nucleic Acid
  misc_feature (31)..(31): n stands for inosine
uaucgcaacugaugaggccguuaggccgaanuucccuu

SEQ ID NO: 9990 - RNA, 38 nt, Artificial Sequence
  Description of Artificial Sequence:  Enzymatic Nucleic Acid
  misc_feature (31)..(31): n stands for inosine
ugggcucacugaugaggccguuaggccgaanuaucgca

SEQ ID NO: 9991 - RNA, 38 nt, Artificial Sequence
  Description of Artificial Sequence:  Enzymatic Nucleic Acid
  misc_feature (31)..(31): n stands for inosine
cuguucugcugaugaggccguuaggccgaancucaugu

SEQ ID NO: 9992 - RNA, 38 nt, Artificial Sequence
  Description of Artificial Sequence:  Enzymatic Nucleic Acid
  misc_feature (31)..(31): n stands for inosine
ucuguucucugaugaggccguuaggccgaangcucaug

SEQ ID NO: 9993 - RNA, 38 nt, Artificial Sequence
  Description of Artificial Sequence:  Enzymatic Nucleic Acid
  misc_feature (31)..(31): n stands for inosine
aucuguuccugaugaggccguuaggccgaanggcucau

SEQ ID NO: 9994 - RNA, 38 nt, Artificial Sequence
  Description of Artificial Sequence:  Enzymatic Nucleic Acid
  misc_feature (31)..(31): n stands for inosine
aagaaauccugaugaggccguuaggccgaanuucuggg

SEQ ID NO: 9995 - RNA, 38 nt, Artificial Sequence
  Description of Artificial Sequence:  Enzymatic Nucleic Acid
  misc_feature (31)..(31): n stands for inosine
ucuugcgacugaugaggccguuaggccgaanaaaucug

SEQ ID NO: 9996 - RNA, 38 nt, Artificial Sequence
  Description of Artificial Sequence:  Enzymatic Nucleic Acid
  misc_feature (31)..(31): n stands for inosine
cauagucucugaugaggccguuaggccgaancgaagaa

SEQ ID NO: 9997 - RNA, 38 nt, Artificial Sequence
  Description of Artificial Sequence:  Enzymatic Nucleic Acid
  misc_feature (31)..(31): n stands for inosine
cuuuccaucugaugaggccguuaggccgaanucuugcg

SEQ ID NO: 9998 - RNA, 38 nt, Artificial Sequence
  Description of Artificial Sequence:  Enzymatic Nucleic Acid
  misc_feature (31)..(31): n stands for inosine
agcguagacugaugaggccguuaggccgaanuccacuu

SEQ ID NO: 9999 - RNA, 38 nt, Artificial Sequence
  Description of Artificial Sequence:  Enzymatic Nucleic Acid
  misc_feature (31)..(31): n stands for inosine
aagcguagcugaugaggccguuaggccgaanguccacu

SEQ ID NO: 10000 - RNA, 38 nt, Artificial Sequence
  Description of Artificial Sequence:  Enzymatic Nucleic Acid
  misc_feature (31)..(31): n stands for inosine
caaagcgucugaugaggccguuaggccgaanaggucca

SEQ ID NO: 10001 - RNA, 38 nt, Artificial Sequence
  Description of Artificial Sequence:  Enzymatic Nucleic Acid
  misc_feature (31)..(31): n stands for inosine
agccccaacugaugaggccguuaggccgaancguagag

SEQ ID NO: 10002 - RNA, 38 nt, Artificial Sequence
  Description of Artificial Sequence:  Enzymatic Nucleic Acid
  misc_feature (31)..(31): n stands for inosine
caagaauucugaugaggccguuaggccgaanccccaaa

SEQ ID NO: 10003 - RNA, 38 nt, Artificial Sequence
  Description of Artificial Sequence:  Enzymatic Nucleic Acid
  misc_feature (31)..(31): n stands for inosine
guucagcacugaugaggccguuaggccgaanaauuagc

SEQ ID NO: 10004 - RNA, 38 nt, Artificial Sequence
  Description of Artificial Sequence:  Enzymatic Nucleic Acid
  misc_feature (31)..(31): n stands for inosine
agaaguuccugaugaggccguuaggccgaancaagaau

SEQ ID NO: 10005 - RNA, 38 nt, Artificial Sequence
  Description of Artificial Sequence:  Enzymatic Nucleic Acid
  misc_feature (31)..(31): n stands for inosine
caugaagacugaugaggccguuaggccgaanuucagca

SEQ ID NO: 10006 - RNA, 38 nt, Artificial Sequence
  Description of Artificial Sequence:  Enzymatic Nucleic Acid
  misc_feature (31)..(31): n stands for inosine
auacaugacugaugaggccguuaggccgaanaaguuca

SEQ ID NO: 10007 - RNA, 38 nt, Artificial Sequence
  Description of Artificial Sequence:  Enzymatic Nucleic Acid
  misc_feature (31)..(31): n stands for inosine
cacauacacugaugaggccguuaggccgaanaagaagu

SEQ ID NO: 10008 - RNA, 38 nt, Artificial Sequence
  Description of Artificial Sequence:  Enzymatic Nucleic Acid
  misc_feature (31)..(31): n stands for inosine
aaaagcagcugaugaggccguuaggccgaanucacaua

SEQ ID NO: 10009 - RNA, 38 nt, Artificial Sequence
  Description of Artificial Sequence:  Enzymatic Nucleic Acid
  misc_feature (31)..(31): n stands for inosine
ucaaaagccugaugaggccguuaggccgaanugucaca

SEQ ID NO: 10010 - RNA, 38 nt, Artificial Sequence
  Description of Artificial Sequence:  Enzymatic Nucleic Acid
  misc_feature (31)..(31): n stands for inosine
guuucaaacugaugaggccguuaggccgaancaguguc

SEQ ID NO: 10011 - RNA, 38 nt, Artificial Sequence
  Description of Artificial Sequence:  Enzymatic Nucleic Acid
  misc_feature (31)..(31): n stands for inosine
aacuuugacugaugaggccguuaggccgaanuuucaaa

SEQ ID NO: 10012 - RNA, 38 nt, Artificial Sequence
  Description of Artificial Sequence:  Enzymatic Nucleic Acid
  misc_feature (31)..(31): n stands for inosine
aaaaacuucugaugaggccguuaggccgaanauguuuc

SEQ ID NO: 10013 - RNA, 38 nt, Artificial Sequence
  Description of Artificial Sequence:  Enzymatic Nucleic Acid
  misc_feature (31)..(31): n stands for inosine
uaggucugcugaugaggccguuaggccgaanaaaaacu

SEQ ID NO: 10014 - RNA, 38 nt, Artificial Sequence
  Description of Artificial Sequence:  Enzymatic Nucleic Acid
  misc_feature (31)..(31): n stands for inosine
cguagguccugaugaggccguuaggccgaanugaaaaa

SEQ ID NO: 10015 - RNA, 38 nt, Artificial Sequence
  Description of Artificial Sequence:  Enzymatic Nucleic Acid
  misc_feature (31)..(31): n stands for inosine
aucccguacugaugaggccguuaggccgaanucuguga

SEQ ID NO: 10016 - RNA, 38 nt, Artificial Sequence
  Description of Artificial Sequence:  Enzymatic Nucleic Acid
  misc_feature (31)..(31): n stands for inosine
caucccgucugaugaggccguuaggccgaangucugug

SEQ ID NO: 10017 - RNA, 38 nt, Artificial Sequence
  Description of Artificial Sequence:  Enzymatic Nucleic Acid
  misc_feature (31)..(31): n stands for inosine
ugagaugacugaugaggccguuaggccgaanccauccc

SEQ ID NO: 10018 - RNA, 38 nt, Artificial Sequence
  Description of Artificial Sequence:  Enzymatic Nucleic Acid
  misc_feature (31)..(31): n stands for inosine
aucugagacugaugaggccguuaggccgaanaugccau

SEQ ID NO: 10019 - RNA, 38 nt, Artificial Sequence
  Description of Artificial Sequence:  Enzymatic Nucleic Acid
  misc_feature (31)..(31): n stands for inosine
uauaucugcugaugaggccguuaggccgaanaugaugc

SEQ ID NO: 10020 - RNA, 38 nt, Artificial Sequence
  Description of Artificial Sequence:  Enzymatic Nucleic Acid
  misc_feature (31)..(31): n stands for inosine
aauauauccugaugaggccguuaggccgaanagaugau

SEQ ID NO: 10021 - RNA, 38 nt, Artificial Sequence
  Description of Artificial Sequence:  Enzymatic Nucleic Acid
  misc_feature (31)..(31): n stands for inosine
uguagaagcugaugaggccguuaggccgaanuuuuuuc

SEQ ID NO: 10022 - RNA, 38 nt, Artificial Sequence
  Description of Artificial Sequence:  Enzymatic Nucleic Acid
  misc_feature (31)..(31): n stands for inosine
ucuguagacugaugaggccguuaggccgaanaguuuuu

SEQ ID NO: 10023 - RNA, 38 nt, Artificial Sequence
  Description of Artificial Sequence:  Enzymatic Nucleic Acid
  misc_feature (31)..(31): n stands for inosine
auuucugucugaugaggccguuaggccgaanaagaguu

SEQ ID NO: 10024 - RNA, 38 nt, Artificial Sequence
  Description of Artificial Sequence:  Enzymatic Nucleic Acid
  misc_feature (31)..(31): n stands for inosine
guaauuuccugaugaggccguuaggccgaanuagaaga

SEQ ID NO: 10025 - RNA, 38 nt, Artificial Sequence
  Description of Artificial Sequence:  Enzymatic Nucleic Acid
  misc_feature (31)..(31): n stands for inosine
ucuuugagcugaugaggccguuaggccgaanuaauuuc

SEQ ID NO: 10026 - RNA, 38 nt, Artificial Sequence
  Description of Artificial Sequence:  Enzymatic Nucleic Acid
  misc_feature (31)..(31): n stands for inosine
uuucuuugcugaugaggccguuaggccgaanaguaauu

SEQ ID NO: 10027 - RNA, 38 nt, Artificial Sequence
  Description of Artificial Sequence:  Enzymatic Nucleic Acid
  misc_feature (31)..(31): n stands for inosine
gguuucuucugaugaggccguuaggccgaanagaguaa

SEQ ID NO: 10028 - RNA, 38 nt, Artificial Sequence
  Description of Artificial Sequence:  Enzymatic Nucleic Acid
  misc_feature (31)..(31): n stands for inosine
gauccucacugaugaggccguuaggccgaanuuucuuu

SEQ ID NO: 10029 - RNA, 38 nt, Artificial Sequence
  Description of Artificial Sequence:  Enzymatic Nucleic Acid
  misc_feature (31)..(31): n stands for inosine
cgauccuccugaugaggccguuaggccgaanguuucuu

SEQ ID NO: 10030 - RNA, 38 nt, Artificial Sequence
  Description of Artificial Sequence:  Enzymatic Nucleic Acid
  misc_feature (31)..(31): n stands for inosine
auguguuacugaugaggccguuaggccgaanucgaucc

SEQ ID NO: 10031 - RNA, 38 nt, Artificial Sequence
  Description of Artificial Sequence:  Enzymatic Nucleic Acid
  misc_feature (31)..(31): n stands for inosine
gauguguucugaugaggccguuaggccgaangucgauc

SEQ ID NO: 10032 - RNA, 38 nt, Artificial Sequence
  Description of Artificial Sequence:  Enzymatic Nucleic Acid
  misc_feature (31)..(31): n stands for inosine
uucagaugcugaugaggccguuaggccgaanuuagguc

SEQ ID NO: 10033 - RNA, 38 nt, Artificial Sequence
  Description of Artificial Sequence:  Enzymatic Nucleic Acid
  misc_feature (31)..(31): n stands for inosine
auuucagacugaugaggccguuaggccgaanuguuagg

SEQ ID NO: 10034 - RNA, 38 nt, Artificial Sequence
  Description of Artificial Sequence:  Enzymatic Nucleic Acid
  misc_feature (31)..(31): n stands for inosine
aguauuuccugaugaggccguuaggccgaanauguguu

SEQ ID NO: 10035 - RNA, 38 nt, Artificial Sequence
  Description of Artificial Sequence:  Enzymatic Nucleic Acid
  misc_feature (31)..(31): n stands for inosine
agguccuucugaugaggccguuaggccgaanuauuuca

SEQ ID NO: 10036 - RNA, 38 nt, Artificial Sequence
  Description of Artificial Sequence:  Enzymatic Nucleic Acid
  misc_feature (31)..(31): n stands for inosine
acagucaacugaugaggccguuaggccgaanuccuuag

SEQ ID NO: 10037 - RNA, 38 nt, Artificial Sequence
  Description of Artificial Sequence:  Enzymatic Nucleic Acid
  misc_feature (31)..(31): n stands for inosine
cacagucacugaugaggccguuaggccgaanguccuua

SEQ ID NO: 10038 - RNA, 38 nt, Artificial Sequence
  Description of Artificial Sequence:  Enzymatic Nucleic Acid
  misc_feature (31)..(31): n stands for inosine
uuccacaccugaugaggccguuaggccgaanucaaggu

SEQ ID NO: 10039 - RNA, 38 nt, Artificial Sequence
  Description of Artificial Sequence:  Enzymatic Nucleic Acid
  misc_feature (31)..(31): n stands for inosine
uuucucugcugaugaggccguuaggccgaancuuuucu

SEQ ID NO: 10040 - RNA, 38 nt, Artificial Sequence
  Description of Artificial Sequence:  Enzymatic Nucleic Acid
  misc_feature (31)..(31): n stands for inosine
uuuucucucugaugaggccguuaggccgaangcuuuuc

SEQ ID NO: 10041 - RNA, 38 nt, Artificial Sequence
  Description of Artificial Sequence:  Enzymatic Nucleic Acid
  misc_feature (31)..(31): n stands for inosine
uuuuucuccugaugaggccguuaggccgaanggcuuuu

SEQ ID NO: 10042 - RNA, 38 nt, Artificial Sequence
  Description of Artificial Sequence:  Enzymatic Nucleic Acid
  misc_feature (31)..(31): n stands for inosine
aacaugugcugaugaggccguuaggccgaanucguuca

SEQ ID NO: 10043 - RNA, 38 nt, Artificial Sequence
  Description of Artificial Sequence:  Enzymatic Nucleic Acid
  misc_feature (31)..(31): n stands for inosine
cuaacaugcugaugaggccguuaggccgaanugucguu

SEQ ID NO: 10044 - RNA, 38 nt, Artificial Sequence
  Description of Artificial Sequence:  Enzymatic Nucleic Acid
  misc_feature (31)..(31): n stands for inosine
cucuaacacugaugaggccguuaggccgaanugugucg

SEQ ID NO: 10045 - RNA, 38 nt, Artificial Sequence
  Description of Artificial Sequence:  Enzymatic Nucleic Acid
  misc_feature (31)..(31): n stands for inosine
uucagaagcugaugaggccguuaggccgaancucuaac

SEQ ID NO: 10046 - RNA, 38 nt, Artificial Sequence
  Description of Artificial Sequence:  Enzymatic Nucleic Acid
  misc_feature (31)..(31): n stands for inosine
uuucagaacugaugaggccguuaggccgaangcucuaa

SEQ ID NO: 10047 - RNA, 38 nt, Artificial Sequence
  Description of Artificial Sequence:  Enzymatic Nucleic Acid
  misc_feature (31)..(31): n stands for inosine
uuuucagacugaugaggccguuaggccgaanggcucua

SEQ ID NO: 10048 - RNA, 38 nt, Artificial Sequence
  Description of Artificial Sequence:  Enzymatic Nucleic Acid
  misc_feature (31)..(31): n stands for inosine
acuuuuuccugaugaggccguuaggccgaanaagggcu

SEQ ID NO: 10049 - RNA, 38 nt, Artificial Sequence
  Description of Artificial Sequence:  Enzymatic Nucleic Acid
  misc_feature (31)..(31): n stands for inosine
cagaagcacugaugaggccguuaggccgaanauacuuu

SEQ ID NO: 10050 - RNA, 38 nt, Artificial Sequence
  Description of Artificial Sequence:  Enzymatic Nucleic Acid
  misc_feature (31)..(31): n stands for inosine
ucagaagccugaugaggccguuaggccgaangauacuu

SEQ ID NO: 10051 - RNA, 38 nt, Artificial Sequence
  Description of Artificial Sequence:  Enzymatic Nucleic Acid
  misc_feature (31)..(31): n stands for inosine
auaucagacugaugaggccguuaggccgaancaggaua

SEQ ID NO: 10052 - RNA, 38 nt, Artificial Sequence
  Description of Artificial Sequence:  Enzymatic Nucleic Acid
  misc_feature (31)..(31): n stands for inosine
ugcauauccugaugaggccguuaggccgaanaagcagg

SEQ ID NO: 10053 - RNA, 38 nt, Artificial Sequence
  Description of Artificial Sequence:  Enzymatic Nucleic Acid
  misc_feature (31)..(31): n stands for inosine
aggaaaaccugaugaggccguuaggccgaancauauca

SEQ ID NO: 10054 - RNA, 38 nt, Artificial Sequence
  Description of Artificial Sequence:  Enzymatic Nucleic Acid
  misc_feature (31)..(31): n stands for inosine
uaauuuaacugaugaggccguuaggccgaanaaaacug

SEQ ID NO: 10055 - RNA, 38 nt, Artificial Sequence
  Description of Artificial Sequence:  Enzymatic Nucleic Acid
  misc_feature (31)..(31): n stands for inosine
auaauuuacugaugaggccguuaggccgaangaaaacu

SEQ ID NO: 10056 - RNA, 38 nt, Artificial Sequence
  Description of Artificial Sequence:  Enzymatic Nucleic Acid
  misc_feature (31)..(31): n stands for inosine
cagauuuucugaugaggccguuaggccgaanauaauuu

SEQ ID NO: 10057 - RNA, 38 nt, Artificial Sequence
  Description of Artificial Sequence:  Enzymatic Nucleic Acid
  misc_feature (31)..(31): n stands for inosine
ucccuagccugaugaggccguuaggccgaanauuuuag

SEQ ID NO: 10058 - RNA, 38 nt, Artificial Sequence
  Description of Artificial Sequence:  Enzymatic Nucleic Acid
  misc_feature (31)..(31): n stands for inosine
uauucccucugaugaggccguuaggccgaancagauuu

SEQ ID NO: 10059 - RNA, 38 nt, Artificial Sequence
  Description of Artificial Sequence:  Enzymatic Nucleic Acid
  misc_feature (31)..(31): n stands for inosine
auaucuaucugaugaggccguuaggccgaanauauucc

SEQ ID NO: 10060 - RNA, 38 nt, Artificial Sequence
  Description of Artificial Sequence:  Enzymatic Nucleic Acid
  misc_feature (31)..(31): n stands for inosine
aaauaaaacugaugaggccguuaggccgaanuaaauau

SEQ ID NO: 10061 - RNA, 38 nt, Artificial Sequence
  Description of Artificial Sequence:  Enzymatic Nucleic Acid
  misc_feature (31)..(31): n stands for inosine
aaaauaaacugaugaggccguuaggccgaanguaaaua

SEQ ID NO: 10062 - RNA, 38 nt, Artificial Sequence
  Description of Artificial Sequence:  Enzymatic Nucleic Acid
  misc_feature (31)..(31): n stands for inosine
aaauuaaacugaugaggccguuaggccgaanaaacauu

SEQ ID NO: 10063 - RNA, 38 nt, Artificial Sequence
  Description of Artificial Sequence:  Enzymatic Nucleic Acid
  misc_feature (31)..(31): n stands for inosine
aaaauuaacugaugaggccguuaggccgaangaaacau

SEQ ID NO: 10064 - RNA, 38 nt, Artificial Sequence
  Description of Artificial Sequence:  Enzymatic Nucleic Acid
  misc_feature (31)..(31): n stands for inosine
guaaaaaucugaugaggccguuaggccgaanuaaaaaa

SEQ ID NO: 10065 - RNA, 38 nt, Artificial Sequence
  Description of Artificial Sequence:  Enzymatic Nucleic Acid
  misc_feature (31)..(31): n stands for inosine
gaaagauucugaugaggccguuaggccgaanuaaaaau

SEQ ID NO: 10066 - RNA, 38 nt, Artificial Sequence
  Description of Artificial Sequence:  Enzymatic Nucleic Acid
  misc_feature (31)..(31): n stands for inosine
cugcagaacugaugaggccguuaggccgaanauuagua

SEQ ID NO: 10067 - RNA, 38 nt, Artificial Sequence
  Description of Artificial Sequence:  Enzymatic Nucleic Acid
  misc_feature (31)..(31): n stands for inosine
guuucugccugaugaggccguuaggccgaanaaagauu

SEQ ID NO: 10068 - RNA, 38 nt, Artificial Sequence
  Description of Artificial Sequence:  Enzymatic Nucleic Acid
  misc_feature (31)..(31): n stands for inosine
ucuguuuccugaugaggccguuaggccgaancagaaag

SEQ ID NO: 10069 - RNA, 38 nt, Artificial Sequence
  Description of Artificial Sequence:  Enzymatic Nucleic Acid
  misc_feature (31)..(31): n stands for inosine
aaccuuuccugaugaggccguuaggccgaanuuucugc

SEQ ID NO: 10070 - RNA, 38 nt, Artificial Sequence
  Description of Artificial Sequence:  Enzymatic Nucleic Acid
  misc_feature (31)..(31): n stands for inosine
caaaaagacugaugaggccguuaggccgaanaaaaccu

SEQ ID NO: 10071 - RNA, 38 nt, Artificial Sequence
  Description of Artificial Sequence:  Enzymatic Nucleic Acid
  misc_feature (31)..(31): n stands for inosine
aagcaaaacugaugaggccguuaggccgaanaagaaaa

SEQ ID NO: 10072 - RNA, 38 nt, Artificial Sequence
  Description of Artificial Sequence:  Enzymatic Nucleic Acid
  misc_feature (31)..(31): n stands for inosine
guuuuugacugaugaggccguuaggccgaancaaaaag

SEQ ID NO: 10073 - RNA, 38 nt, Artificial Sequence
  Description of Artificial Sequence:  Enzymatic Nucleic Acid
  misc_feature (31)..(31): n stands for inosine
aauguuuucugaugaggccguuaggccgaanaagcaaa

SEQ ID NO: 10074 - RNA, 38 nt, Artificial Sequence
  Description of Artificial Sequence:  Enzymatic Nucleic Acid
  misc_feature (31)..(31): n stands for inosine
uguaagaacugaugaggccguuaggccgaanuuuuuga

SEQ ID NO: 10075 - RNA, 38 nt, Artificial Sequence
  Description of Artificial Sequence:  Enzymatic Nucleic Acid
  misc_feature (31)..(31): n stands for inosine
aaaauguacugaugaggccguuaggccgaanaauguuu

SEQ ID NO: 10076 - RNA, 38 nt, Artificial Sequence
  Description of Artificial Sequence:  Enzymatic Nucleic Acid
  misc_feature (31)..(31): n stands for inosine
aaguaaaacugaugaggccguuaggccgaanuaagaau

SEQ ID NO: 10077 - RNA, 38 nt, Artificial Sequence
  Description of Artificial Sequence:  Enzymatic Nucleic Acid
  misc_feature (31)..(31): n stands for inosine
caggaaaacugaugaggccguuaggccgaanuaaaaug

SEQ ID NO: 10078 - RNA, 38 nt, Artificial Sequence
  Description of Artificial Sequence:  Enzymatic Nucleic Acid
  misc_feature (31)..(31): n stands for inosine
augagccacugaugaggccguuaggccgaanaaaaagu

SEQ ID NO: 10079 - RNA, 38 nt, Artificial Sequence
  Description of Artificial Sequence:  Enzymatic Nucleic Acid
  misc_feature (31)..(31): n stands for inosine
gaugagcccugaugaggccguuaggccgaangaaaaag

SEQ ID NO: 10080 - RNA, 38 nt, Artificial Sequence
  Description of Artificial Sequence:  Enzymatic Nucleic Acid
  misc_feature (31)..(31): n stands for inosine
aagagaugcugaugaggccguuaggccgaanccaggaa

SEQ ID NO: 10081 - RNA, 38 nt, Artificial Sequence
  Description of Artificial Sequence:  Enzymatic Nucleic Acid
  misc_feature (31)..(31): n stands for inosine
uaaagagacugaugaggccguuaggccgaanagccagg

SEQ ID NO: 10082 - RNA, 38 nt, Artificial Sequence
  Description of Artificial Sequence:  Enzymatic Nucleic Acid
  misc_feature (31)..(31): n stands for inosine
gaauaaagcugaugaggccguuaggccgaanaugagcc

SEQ ID NO: 10083 - RNA, 38 nt, Artificial Sequence
  Description of Artificial Sequence:  Enzymatic Nucleic Acid
  misc_feature (31)..(31): n stands for inosine
aagaauaacugaugaggccguuaggccgaanagaugag

SEQ ID NO: 10084 - RNA, 38 nt, Artificial Sequence
  Description of Artificial Sequence:  Enzymatic Nucleic Acid
  misc_feature (31)..(31): n stands for inosine
aaaaaaaacugaugaggccguuaggccgaanaauaaag

SEQ ID NO: 10085 - RNA, 38 nt, Artificial Sequence
  Description of Artificial Sequence:  Enzymatic Nucleic Acid
  misc_feature (31)..(31): n stands for inosine
cgagacuccugaugaggccguuaggccgaanucuuuaa

SEQ ID NO: 10086 - RNA, 38 nt, Artificial Sequence
  Description of Artificial Sequence:  Enzymatic Nucleic Acid
  misc_feature (31)..(31): n stands for inosine
acagagcgcugaugaggccguuaggccgaanacucugu

SEQ ID NO: 10087 - RNA, 38 nt, Artificial Sequence
  Description of Artificial Sequence:  Enzymatic Nucleic Acid
  misc_feature (31)..(31): n stands for inosine
ggcaacagcugaugaggccguuaggccgaancgagacu

SEQ ID NO: 10088 - RNA, 38 nt, Artificial Sequence
  Description of Artificial Sequence:  Enzymatic Nucleic Acid
  misc_feature (31)..(31): n stands for inosine
ugggcaaccugaugaggccguuaggccgaanagcgaga

SEQ ID NO: 10089 - RNA, 38 nt, Artificial Sequence
  Description of Artificial Sequence:  Enzymatic Nucleic Acid
  misc_feature (31)..(31): n stands for inosine
ccagccugcugaugaggccguuaggccgaancaacaga

SEQ ID NO: 10090 - RNA, 38 nt, Artificial Sequence
  Description of Artificial Sequence:  Enzymatic Nucleic Acid
  misc_feature (31)..(31): n stands for inosine
uccagccucugaugaggccguuaggccgaangcaacag

SEQ ID NO: 10091 - RNA, 38 nt, Artificial Sequence
  Description of Artificial Sequence:  Enzymatic Nucleic Acid
  misc_feature (31)..(31): n stands for inosine
cuccagcccugaugaggccguuaggccgaanggcaaca

SEQ ID NO: 10092 - RNA, 38 nt, Artificial Sequence
  Description of Artificial Sequence:  Enzymatic Nucleic Acid
  misc_feature (31)..(31): n stands for inosine
ugcacucccugaugaggccguuaggccgaanccugggc

SEQ ID NO: 10093 - RNA, 38 nt, Artificial Sequence
  Description of Artificial Sequence:  Enzymatic Nucleic Acid
  misc_feature (31)..(31): n stands for inosine
ugugucaucugaugaggccguuaggccgaancacucca

SEQ ID NO: 10094 - RNA, 38 nt, Artificial Sequence
  Description of Artificial Sequence:  Enzymatic Nucleic Acid
  misc_feature (31)..(31): n stands for inosine
caagacugcugaugaggccguuaggccgaanucauugc

SEQ ID NO: 10095 - RNA, 38 nt, Artificial Sequence
  Description of Artificial Sequence:  Enzymatic Nucleic Acid
  misc_feature (31)..(31): n stands for inosine
gccaagaccugaugaggccguuaggccgaanugucauu

SEQ ID NO: 10096 - RNA, 38 nt, Artificial Sequence
  Description of Artificial Sequence:  Enzymatic Nucleic Acid
  misc_feature (31)..(31): n stands for inosine
gugagccacugaugaggccguuaggccgaanacugugu

SEQ ID NO: 10097 - RNA, 38 nt, Artificial Sequence
  Description of Artificial Sequence:  Enzymatic Nucleic Acid
  misc_feature (31)..(31): n stands for inosine
uugcagugcugaugaggccguuaggccgaanccaagac

SEQ ID NO: 10098 - RNA, 38 nt, Artificial Sequence
  Description of Artificial Sequence:  Enzymatic Nucleic Acid
  misc_feature (31)..(31): n stands for inosine
aguugcagcugaugaggccguuaggccgaanagccaag

SEQ ID NO: 10099 - RNA, 38 nt, Artificial Sequence
  Description of Artificial Sequence:  Enzymatic Nucleic Acid
  misc_feature (31)..(31): n stands for inosine
gaaguugccugaugaggccguuaggccgaanugagcca

SEQ ID NO: 10100 - RNA, 38 nt, Artificial Sequence
  Description of Artificial Sequence:  Enzymatic Nucleic Acid
  misc_feature (31)..(31): n stands for inosine
gcagaagucugaugaggccguuaggccgaancagugag

SEQ ID NO: 10101 - RNA, 38 nt, Artificial Sequence
  Description of Artificial Sequence:  Enzymatic Nucleic Acid
  misc_feature (31)..(31): n stands for inosine
gaggcagacugaugaggccguuaggccgaanuugcagu

SEQ ID NO: 10102 - RNA, 38 nt, Artificial Sequence
  Description of Artificial Sequence:  Enzymatic Nucleic Acid
  misc_feature (31)..(31): n stands for inosine
caagaggccugaugaggccguuaggccgaanaaguugc

SEQ ID NO: 10103 - RNA, 38 nt, Artificial Sequence
  Description of Artificial Sequence:  Enzymatic Nucleic Acid
  misc_feature (31)..(31): n stands for inosine
acccaagacugaugaggccguuaggccgaancagaagu

SEQ ID NO: 10104 - RNA, 38 nt, Artificial Sequence
  Description of Artificial Sequence:  Enzymatic Nucleic Acid
  misc_feature (31)..(31): n stands for inosine
aacccaagcugaugaggccguuaggccgaangcagaag

SEQ ID NO: 10105 - RNA, 38 nt, Artificial Sequence
  Description of Artificial Sequence:  Enzymatic Nucleic Acid
  misc_feature (31)..(31): n stands for inosine
ugaacccacugaugaggccguuaggccgaanaggcaga

SEQ ID NO: 10106 - RNA, 38 nt, Artificial Sequence
  Description of Artificial Sequence:  Enzymatic Nucleic Acid
  misc_feature (31)..(31): n stands for inosine
gaaucacucugaugaggccguuaggccgaanaacccaa

SEQ ID NO: 10107 - RNA, 38 nt, Artificial Sequence
  Description of Artificial Sequence:  Enzymatic Nucleic Acid
  misc_feature (31)..(31): n stands for inosine
gaggcaggcugaugaggccguuaggccgaanaaucacu

SEQ ID NO: 10108 - RNA, 38 nt, Artificial Sequence
  Description of Artificial Sequence:  Enzymatic Nucleic Acid
  misc_feature (31)..(31): n stands for inosine
cugaggcacugaugaggccguuaggccgaanagaauca

SEQ ID NO: 10109 - RNA, 38 nt, Artificial Sequence
  Description of Artificial Sequence:  Enzymatic Nucleic Acid
  misc_feature (31)..(31): n stands for inosine
gcugaggccugaugaggccguuaggccgaangagaauc

SEQ ID NO: 10110 - RNA, 38 nt, Artificial Sequence
  Description of Artificial Sequence:  Enzymatic Nucleic Acid
  misc_feature (31)..(31): n stands for inosine
gaggcugacugaugaggccguuaggccgaancaggaga

SEQ ID NO: 10111 - RNA, 38 nt, Artificial Sequence
  Description of Artificial Sequence:  Enzymatic Nucleic Acid
  misc_feature (31)..(31): n stands for inosine
ggaggcugcugaugaggccguuaggccgaangcaggag

SEQ ID NO: 10112 - RNA, 38 nt, Artificial Sequence
  Description of Artificial Sequence:  Enzymatic Nucleic Acid
  misc_feature (31)..(31): n stands for inosine
caggaggccugaugaggccguuaggccgaanaggcagg

SEQ ID NO: 10113 - RNA, 38 nt, Artificial Sequence
  Description of Artificial Sequence:  Enzymatic Nucleic Acid
  misc_feature (31)..(31): n stands for inosine
acucaggacugaugaggccguuaggccgaancugaggc

SEQ ID NO: 10114 - RNA, 38 nt, Artificial Sequence
  Description of Artificial Sequence:  Enzymatic Nucleic Acid
  misc_feature (31)..(31): n stands for inosine
uacucaggcugaugaggccguuaggccgaangcugagg

SEQ ID NO: 10115 - RNA, 38 nt, Artificial Sequence
  Description of Artificial Sequence:  Enzymatic Nucleic Acid
  misc_feature (31)..(31): n stands for inosine
gcuacucacugaugaggccguuaggccgaanaggcuga

SEQ ID NO: 10116 - RNA, 38 nt, Artificial Sequence
  Description of Artificial Sequence:  Enzymatic Nucleic Acid
  misc_feature (31)..(31): n stands for inosine
agcuacuccugaugaggccguuaggccgaangaggcug

SEQ ID NO: 10117 - RNA, 38 nt, Artificial Sequence
  Description of Artificial Sequence:  Enzymatic Nucleic Acid
  misc_feature (31)..(31): n stands for inosine
uguaaucccugaugaggccguuaggccgaancuacuca

SEQ ID NO: 10118 - RNA, 38 nt, Artificial Sequence
  Description of Artificial Sequence:  Enzymatic Nucleic Acid
  misc_feature (31)..(31): n stands for inosine
cacaugcccugaugaggccguuaggccgaanuaaucca

SEQ ID NO: 10119 - RNA, 38 nt, Artificial Sequence
  Description of Artificial Sequence:  Enzymatic Nucleic Acid
  misc_feature (31)..(31): n stands for inosine
guggcacacugaugaggccguuaggccgaanccuguaa

SEQ ID NO: 10120 - RNA, 38 nt, Artificial Sequence
  Description of Artificial Sequence:  Enzymatic Nucleic Acid
  misc_feature (31)..(31): n stands for inosine
gggugggucugaugaggccguuaggccgaancacaugc

SEQ ID NO: 10121 - RNA, 38 nt, Artificial Sequence
  Description of Artificial Sequence:  Enzymatic Nucleic Acid
  misc_feature (31)..(31): n stands for inosine
ugggugggcugaugaggccguuaggccgaangcacaug

SEQ ID NO: 10122 - RNA, 38 nt, Artificial Sequence
  Description of Artificial Sequence:  Enzymatic Nucleic Acid
  misc_feature (31)..(31): n stands for inosine
guugggugcugaugaggccguuaggccgaanuggcaca

SEQ ID NO: 10123 - RNA, 38 nt, Artificial Sequence
  Description of Artificial Sequence:  Enzymatic Nucleic Acid
  misc_feature (31)..(31): n stands for inosine
aguugggucugaugaggccguuaggccgaanguggcac

SEQ ID NO: 10124 - RNA, 38 nt, Artificial Sequence
  Description of Artificial Sequence:  Enzymatic Nucleic Acid
  misc_feature (31)..(31): n stands for inosine
uaguugggcugaugaggccguuaggccgaangguggca

SEQ ID NO: 10125 - RNA, 38 nt, Artificial Sequence
  Description of Artificial Sequence:  Enzymatic Nucleic Acid
  misc_feature (31)..(31): n stands for inosine
auuaguugcugaugaggccguuaggccgaanugggugg

SEQ ID NO: 10126 - RNA, 38 nt, Artificial Sequence
  Description of Artificial Sequence:  Enzymatic Nucleic Acid
  misc_feature (31)..(31): n stands for inosine
aauuaguucugaugaggccguuaggccgaangugggug

SEQ ID NO: 10127 - RNA, 38 nt, Artificial Sequence
  Description of Artificial Sequence:  Enzymatic Nucleic Acid
  misc_feature (31)..(31): n stands for inosine
aaauuagucugaugaggccguuaggccgaanggugggu

SEQ ID NO: 10128 - RNA, 38 nt, Artificial Sequence
  Description of Artificial Sequence:  Enzymatic Nucleic Acid
  misc_feature (31)..(31): n stands for inosine
caaaaauucugaugaggccguuaggccgaanuugggug

SEQ ID NO: 10129 - RNA, 38 nt, Artificial Sequence
  Description of Artificial Sequence:  Enzymatic Nucleic Acid
  misc_feature (31)..(31): n stands for inosine
ugaaaccccugaugaggccguuaggccgaanucuuuau

SEQ ID NO: 10130 - RNA, 38 nt, Artificial Sequence
  Description of Artificial Sequence:  Enzymatic Nucleic Acid
  misc_feature (31)..(31): n stands for inosine
caacauggcugaugaggccguuaggccgaanaaacccu

SEQ ID NO: 10131 - RNA, 38 nt, Artificial Sequence
  Description of Artificial Sequence:  Enzymatic Nucleic Acid
  misc_feature (31)..(31): n stands for inosine
gccaacaucugaugaggccguuaggccgaanugaaacc

SEQ ID NO: 10132 - RNA, 38 nt, Artificial Sequence
  Description of Artificial Sequence:  Enzymatic Nucleic Acid
  misc_feature (31)..(31): n stands for inosine
ggccaacacugaugaggccguuaggccgaangugaaac

SEQ ID NO: 10133 - RNA, 38 nt, Artificial Sequence
  Description of Artificial Sequence:  Enzymatic Nucleic Acid
  misc_feature (31)..(31): n stands for inosine
accagccucugaugaggccguuaggccgaanccaacau

SEQ ID NO: 10134 - RNA, 38 nt, Artificial Sequence
  Description of Artificial Sequence:  Enzymatic Nucleic Acid
  misc_feature (31)..(31): n stands for inosine
gaccagcccugaugaggccguuaggccgaangccaaca

SEQ ID NO: 10135 - RNA, 38 nt, Artificial Sequence
  Description of Artificial Sequence:  Enzymatic Nucleic Acid
  misc_feature (31)..(31): n stands for inosine
uugagacccugaugaggccguuaggccgaanccuggcc

SEQ ID NO: 10136 - RNA, 38 nt, Artificial Sequence
  Description of Artificial Sequence:  Enzymatic Nucleic Acid
  misc_feature (31)..(31): n stands for inosine
ggaguuugcugaugaggccguuaggccgaanaccagcc

SEQ ID NO: 10137 - RNA, 38 nt, Artificial Sequence
  Description of Artificial Sequence:  Enzymatic Nucleic Acid
  misc_feature (31)..(31): n stands for inosine
caggaguucugaugaggccguuaggccgaanagaccag

SEQ ID NO: 10138 - RNA, 38 nt, Artificial Sequence
  Description of Artificial Sequence:  Enzymatic Nucleic Acid
  misc_feature (31)..(31): n stands for inosine
aggucaggcugaugaggccguuaggccgaanuuugaga

SEQ ID NO: 10139 - RNA, 38 nt, Artificial Sequence
  Description of Artificial Sequence:  Enzymatic Nucleic Acid
  misc_feature (31)..(31): n stands for inosine
ugaggucacugaugaggccguuaggccgaanaguuuga

SEQ ID NO: 10140 - RNA, 38 nt, Artificial Sequence
  Description of Artificial Sequence:  Enzymatic Nucleic Acid
  misc_feature (31)..(31): n stands for inosine
uugagguccugaugaggccguuaggccgaangaguuug

SEQ ID NO: 10141 - RNA, 38 nt, Artificial Sequence
  Description of Artificial Sequence:  Enzymatic Nucleic Acid
  misc_feature (31)..(31): n stands for inosine
uuacuugacugaugaggccguuaggccgaanucaggag

SEQ ID NO: 10142 - RNA, 38 nt, Artificial Sequence
  Description of Artificial Sequence:  Enzymatic Nucleic Acid
  misc_feature (31)..(31): n stands for inosine
auuacuugcugaugaggccguuaggccgaangucagga

SEQ ID NO: 10143 - RNA, 38 nt, Artificial Sequence
  Description of Artificial Sequence:  Enzymatic Nucleic Acid
  misc_feature (31)..(31): n stands for inosine
ggauuacucugaugaggccguuaggccgaanaggucag

SEQ ID NO: 10144 - RNA, 38 nt, Artificial Sequence
  Description of Artificial Sequence:  Enzymatic Nucleic Acid
  misc_feature (31)..(31): n stands for inosine
aggcaggucugaugaggccguuaggccgaanauuacuu

SEQ ID NO: 10145 - RNA, 38 nt, Artificial Sequence
  Description of Artificial Sequence:  Enzymatic Nucleic Acid
  misc_feature (31)..(31): n stands for inosine
gaggcaggcugaugaggccguuaggccgaangauuacu

SEQ ID NO: 10146 - RNA, 38 nt, Artificial Sequence
  Description of Artificial Sequence:  Enzymatic Nucleic Acid
  misc_feature (31)..(31): n stands for inosine
ccgaggcacugaugaggccguuaggccgaanuggauua

SEQ ID NO: 10147 - RNA, 38 nt, Artificial Sequence
  Description of Artificial Sequence:  Enzymatic Nucleic Acid
  misc_feature (31)..(31): n stands for inosine
gccgaggccugaugaggccguuaggccgaanguggauu

SEQ ID NO: 10148 - RNA, 38 nt, Artificial Sequence
  Description of Artificial Sequence:  Enzymatic Nucleic Acid
  misc_feature (31)..(31): n stands for inosine
gaggccgacugaugaggccguuaggccgaancaggugg

SEQ ID NO: 10149 - RNA, 38 nt, Artificial Sequence
  Description of Artificial Sequence:  Enzymatic Nucleic Acid
  misc_feature (31)..(31): n stands for inosine
ggaggccgcugaugaggccguuaggccgaangcaggug

SEQ ID NO: 10150 - RNA, 38 nt, Artificial Sequence
  Description of Artificial Sequence:  Enzymatic Nucleic Acid
  misc_feature (31)..(31): n stands for inosine
cuuugggacugaugaggccguuaggccgaanccgaggc

SEQ ID NO: 10151 - RNA, 38 nt, Artificial Sequence
  Description of Artificial Sequence:  Enzymatic Nucleic Acid
  misc_feature (31)..(31): n stands for inosine
acuuugggcugaugaggccguuaggccgaangccgagg

SEQ ID NO: 10152 - RNA, 38 nt, Artificial Sequence
  Description of Artificial Sequence:  Enzymatic Nucleic Acid
  misc_feature (31)..(31): n stands for inosine
gcacuuugcugaugaggccguuaggccgaanaggccga

SEQ ID NO: 10153 - RNA, 38 nt, Artificial Sequence
  Description of Artificial Sequence:  Enzymatic Nucleic Acid
  misc_feature (31)..(31): n stands for inosine
agcacuuucugaugaggccguuaggccgaangaggccg

SEQ ID NO: 10154 - RNA, 38 nt, Artificial Sequence
  Description of Artificial Sequence:  Enzymatic Nucleic Acid
  misc_feature (31)..(31): n stands for inosine
cagcacuucugaugaggccguuaggccgaanggaggcc

SEQ ID NO: 10155 - RNA, 38 nt, Artificial Sequence
  Description of Artificial Sequence:  Enzymatic Nucleic Acid
  misc_feature (31)..(31): n stands for inosine
guaauccccugaugaggccguuaggccgaancacuuug

SEQ ID NO: 10156 - RNA, 38 nt, Artificial Sequence
  Description of Artificial Sequence:  Enzymatic Nucleic Acid
  misc_feature (31)..(31): n stands for inosine
cucauccccugaugaggccguuaggccgaanuaauccc

SEQ ID NO: 10157 - RNA, 38 nt, Artificial Sequence
  Description of Artificial Sequence:  Enzymatic Nucleic Acid
  misc_feature (31)..(31): n stands for inosine
ggcgcggucugaugaggccguuaggccgaancucaucc

SEQ ID NO: 10158 - RNA, 38 nt, Artificial Sequence
  Description of Artificial Sequence:  Enzymatic Nucleic Acid
  misc_feature (31)..(31): n stands for inosine
gggcgcggcugaugaggccguuaggccgaangcucauc

SEQ ID NO: 10159 - RNA, 38 nt, Artificial Sequence
  Description of Artificial Sequence:  Enzymatic Nucleic Acid
  misc_feature (31)..(31): n stands for inosine
cugggcgccugaugaggccguuaggccgaanuggcuca

SEQ ID NO: 10160 - RNA, 38 nt, Artificial Sequence
  Description of Artificial Sequence:  Enzymatic Nucleic Acid
  misc_feature (31)..(31): n stands for inosine
ugaggcugcugaugaggccguuaggccgaancgcggug

SEQ ID NO: 10161 - RNA, 38 nt, Artificial Sequence
  Description of Artificial Sequence:  Enzymatic Nucleic Acid
  misc_feature (31)..(31): n stands for inosine
augaggcucugaugaggccguuaggccgaangcgcggu

SEQ ID NO: 10162 - RNA, 38 nt, Artificial Sequence
  Description of Artificial Sequence:  Enzymatic Nucleic Acid
  misc_feature (31)..(31): n stands for inosine
gaugaggccugaugaggccguuaggccgaanggcgcgg

SEQ ID NO: 10163 - RNA, 38 nt, Artificial Sequence
  Description of Artificial Sequence:  Enzymatic Nucleic Acid
  misc_feature (31)..(31): n stands for inosine
agagaugacugaugaggccguuaggccgaancugggcg

SEQ ID NO: 10164 - RNA, 38 nt, Artificial Sequence
  Description of Artificial Sequence:  Enzymatic Nucleic Acid
  misc_feature (31)..(31): n stands for inosine
aagagaugcugaugaggccguuaggccgaangcugggc

SEQ ID NO: 10165 - RNA, 38 nt, Artificial Sequence
  Description of Artificial Sequence:  Enzymatic Nucleic Acid
  misc_feature (31)..(31): n stands for inosine
caaagagacugaugaggccguuaggccgaanaggcugg

SEQ ID NO: 10166 - RNA, 38 nt, Artificial Sequence
  Description of Artificial Sequence:  Enzymatic Nucleic Acid
  misc_feature (31)..(31): n stands for inosine
gaacaaagcugaugaggccguuaggccgaanaugaggc

SEQ ID NO: 10167 - RNA, 38 nt, Artificial Sequence
  Description of Artificial Sequence:  Enzymatic Nucleic Acid
  misc_feature (31)..(31): n stands for inosine
uagaacaacugaugaggccguuaggccgaanagaugag

SEQ ID NO: 10168 - RNA, 38 nt, Artificial Sequence
  Description of Artificial Sequence:  Enzymatic Nucleic Acid
  misc_feature (31)..(31): n stands for inosine
ccaucuuucugaugaggccguuaggccgaanaacaaag

SEQ ID NO: 10169 - RNA, 38 nt, Artificial Sequence
  Description of Artificial Sequence:  Enzymatic Nucleic Acid
  misc_feature (31)..(31): n stands for inosine
uugggggucugaugaggccguuaggccgaanuuuuucc

SEQ ID NO: 10170 - RNA, 38 nt, Artificial Sequence
  Description of Artificial Sequence:  Enzymatic Nucleic Acid
  misc_feature (31)..(31): n stands for inosine
uuugggggcugaugaggccguuaggccgaanguuuuuc

SEQ ID NO: 10171 - RNA, 38 nt, Artificial Sequence
  Description of Artificial Sequence:  Enzymatic Nucleic Acid
  misc_feature (31)..(31): n stands for inosine
aauuugggcugaugaggccguuaggccgaanugguuuu

SEQ ID NO: 10172 - RNA, 38 nt, Artificial Sequence
  Description of Artificial Sequence:  Enzymatic Nucleic Acid
  misc_feature (31)..(31): n stands for inosine
aaauuuggcugaugaggccguuaggccgaangugguuu

SEQ ID NO: 10173 - RNA, 38 nt, Artificial Sequence
  Description of Artificial Sequence:  Enzymatic Nucleic Acid
  misc_feature (31)..(31): n stands for inosine
aaaauuugcugaugaggccguuaggccgaanggugguu

SEQ ID NO: 10174 - RNA, 38 nt, Artificial Sequence
  Description of Artificial Sequence:  Enzymatic Nucleic Acid
  misc_feature (31)..(31): n stands for inosine
gaaaauuucugaugaggccguuaggccgaanggguggu

SEQ ID NO: 10175 - RNA, 38 nt, Artificial Sequence
  Description of Artificial Sequence:  Enzymatic Nucleic Acid
  misc_feature (31)..(31): n stands for inosine
agaaaauucugaugaggccguuaggccgaanggggugg

SEQ ID NO: 10176 - RNA, 38 nt, Artificial Sequence
  Description of Artificial Sequence:  Enzymatic Nucleic Acid
  misc_feature (31)..(31): n stands for inosine
guauaaaacugaugaggccguuaggccgaanaaaauuu

SEQ ID NO: 10177 - RNA, 38 nt, Artificial Sequence
  Description of Artificial Sequence:  Enzymatic Nucleic Acid
  misc_feature (31)..(31): n stands for inosine
ucauuaaucugaugaggccguuaggccgaanuauaaaa

SEQ ID NO: 10178 - RNA, 38 nt, Artificial Sequence
  Description of Artificial Sequence:  Enzymatic Nucleic Acid
  misc_feature (31)..(31): n stands for inosine
gaauugaucugaugaggccguuaggccgaanauucauu

SEQ ID NO: 10179 - RNA, 38 nt, Artificial Sequence
  Description of Artificial Sequence:  Enzymatic Nucleic Acid
  misc_feature (31)..(31): n stands for inosine
auaugaaucugaugaggccguuaggccgaanauugauu

SEQ ID NO: 10180 - RNA, 38 nt, Artificial Sequence
  Description of Artificial Sequence:  Enzymatic Nucleic Acid
  misc_feature (31)..(31): n stands for inosine
aauagauacugaugaggccguuaggccgaanaauugau

SEQ ID NO: 10181 - RNA, 38 nt, Artificial Sequence
  Description of Artificial Sequence:  Enzymatic Nucleic Acid
  misc_feature (31)..(31): n stands for inosine
uaauaaaucugaugaggccguuaggccgaanauaugaa

SEQ ID NO: 10182 - RNA, 38 nt, Artificial Sequence
  Description of Artificial Sequence:  Enzymatic Nucleic Acid
  misc_feature (31)..(31): n stands for inosine
aaagcggucugaugaggccguuaggccgaanaaauuua

SEQ ID NO: 10183 - RNA, 38 nt, Artificial Sequence
  Description of Artificial Sequence:  Enzymatic Nucleic Acid
  misc_feature (31)..(31): n stands for inosine
cuaaaagccugaugaggccguuaggccgaanuagaaau

SEQ ID NO: 10184 - RNA, 38 nt, Artificial Sequence
  Description of Artificial Sequence:  Enzymatic Nucleic Acid
  misc_feature (31)..(31): n stands for inosine
ggccuaaacugaugaggccguuaggccgaancgguaga

SEQ ID NO: 10185 - RNA, 38 nt, Artificial Sequence
  Description of Artificial Sequence:  Enzymatic Nucleic Acid
  misc_feature (31)..(31): n stands for inosine
auuuuuuucugaugaggccguuaggccgaanccuaaaa

SEQ ID NO: 10186 - RNA, 38 nt, Artificial Sequence
  Description of Artificial Sequence:  Enzymatic Nucleic Acid
  misc_feature (31)..(31): n stands for inosine
cauuuuuucugaugaggccguuaggccgaangccuaaa

SEQ ID NO: 10187 - RNA, 38 nt, Artificial Sequence
  Description of Artificial Sequence:  Enzymatic Nucleic Acid
  misc_feature (31)..(31): n stands for inosine
ugaggcagcugaugaggccguuaggccgaanaacgauc

SEQ ID NO: 10188 - RNA, 38 nt, Artificial Sequence
  Description of Artificial Sequence:  Enzymatic Nucleic Acid
  misc_feature (31)..(31): n stands for inosine
ugugaggccugaugaggccguuaggccgaanagaacga

SEQ ID NO: 10189 - RNA, 38 nt, Artificial Sequence
  Description of Artificial Sequence:  Enzymatic Nucleic Acid
  misc_feature (31)..(31): n stands for inosine
cuaugugacugaugaggccguuaggccgaancagagaa

SEQ ID NO: 10190 - RNA, 38 nt, Artificial Sequence
  Description of Artificial Sequence:  Enzymatic Nucleic Acid
  misc_feature (31)..(31): n stands for inosine
gcuaugugcugaugaggccguuaggccgaangcagaga

SEQ ID NO: 10191 - RNA, 38 nt, Artificial Sequence
  Description of Artificial Sequence:  Enzymatic Nucleic Acid
  misc_feature (31)..(31): n stands for inosine
aagcuaugcugaugaggccguuaggccgaanaggcaga

SEQ ID NO: 10192 - RNA, 38 nt, Artificial Sequence
  Description of Artificial Sequence:  Enzymatic Nucleic Acid
  misc_feature (31)..(31): n stands for inosine
guaagcuacugaugaggccguuaggccgaanugaggca

SEQ ID NO: 10193 - RNA, 38 nt, Artificial Sequence
  Description of Artificial Sequence:  Enzymatic Nucleic Acid
  misc_feature (31)..(31): n stands for inosine
ggcuuguacugaugaggccguuaggccgaancuaugug

SEQ ID NO: 10194 - RNA, 38 nt, Artificial Sequence
  Description of Artificial Sequence:  Enzymatic Nucleic Acid
  misc_feature (31)..(31): n stands for inosine
agcuggcucugaugaggccguuaggccgaanuaagcua

SEQ ID NO: 10195 - RNA, 38 nt, Artificial Sequence
  Description of Artificial Sequence:  Enzymatic Nucleic Acid
  misc_feature (31)..(31): n stands for inosine
cuccagcucugaugaggccguuaggccgaancuuguaa

SEQ ID NO: 10196 - RNA, 38 nt, Artificial Sequence
  Description of Artificial Sequence:  Enzymatic Nucleic Acid
  misc_feature (31)..(31): n stands for inosine
ucuccagccugaugaggccguuaggccgaangcuugua

SEQ ID NO: 10197 - RNA, 38 nt, Artificial Sequence
  Description of Artificial Sequence:  Enzymatic Nucleic Acid
  misc_feature (31)..(31): n stands for inosine
auuucucccugaugaggccguuaggccgaancuggcuu

SEQ ID NO: 10198 - RNA, 38 nt, Artificial Sequence
  Description of Artificial Sequence:  Enzymatic Nucleic Acid
  misc_feature (31)..(31): n stands for inosine
uuuuaaugcugaugaggccguuaggccgaanuaccaua

SEQ ID NO: 10199 - RNA, 38 nt, Artificial Sequence
  Description of Artificial Sequence:  Enzymatic Nucleic Acid
  misc_feature (31)..(31): n stands for inosine
uuuuuuaacugaugaggccguuaggccgaanaguacca

SEQ ID NO: 10200 - RNA, 37 nt, Artificial Sequence
  Description of Artificial Sequence:  Enzymatic Nucleic Acid
cugcgccggccgaaaggcgagugaggucucgccgccg

SEQ ID NO: 10201 - RNA, 37 nt, Artificial Sequence
  Description of Artificial Sequence:  Enzymatic Nucleic Acid
aaacugcggccgaaaggcgagugaggucucgccgccg

SEQ ID NO: 10202 - RNA, 37 nt, Artificial Sequence
  Description of Artificial Sequence:  Enzymatic Nucleic Acid
gcaaacuggccgaaaggcgagugaggucugccgccgc

SEQ ID NO: 10203 - RNA, 37 nt, Artificial Sequence
  Description of Artificial Sequence:  Enzymatic Nucleic Acid
ugagcaaagccgaaaggcgagugaggucuugcgccgc

SEQ ID NO: 10204 - RNA, 37 nt, Artificial Sequence
  Description of Artificial Sequence:  Enzymatic Nucleic Acid
aguaugaggccgaaaggcgagugaggucuaaacugcg

SEQ ID NO: 10205 - RNA, 37 nt, Artificial Sequence
  Description of Artificial Sequence:  Enzymatic Nucleic Acid
gcaagucagccgaaaggcgagugaggucuaaaguaug

SEQ ID NO: 10206 - RNA, 37 nt, Artificial Sequence
  Description of Artificial Sequence:  Enzymatic Nucleic Acid
ugugaccggccgaaaggcgagugaggucuaagucaca

SEQ ID NO: 10207 - RNA, 37 nt, Artificial Sequence
  Description of Artificial Sequence:  Enzymatic Nucleic Acid
cacugugagccgaaaggcgagugaggucucgcaaguc

SEQ ID NO: 10208 - RNA, 37 nt, Artificial Sequence
  Description of Artificial Sequence:  Enzymatic Nucleic Acid
gaaugccagccgaaaggcgagugaggucuugugaccg

SEQ ID NO: 10209 - RNA, 37 nt, Artificial Sequence
  Description of Artificial Sequence:  Enzymatic Nucleic Acid
gcugaauggccgaaaggcgagugaggucucacuguga

SEQ ID NO: 10210 - RNA, 37 nt, Artificial Sequence
  Description of Artificial Sequence:  Enzymatic Nucleic Acid
guguggaggccgaaaggcgagugaggucuugaaugcc

SEQ ID NO: 10211 - RNA, 37 nt, Artificial Sequence
  Description of Artificial Sequence:  Enzymatic Nucleic Acid
ugguucuagccgaaaggcgagugaggucucaagugug

SEQ ID NO: 10212 - RNA, 37 nt, Artificial Sequence
  Description of Artificial Sequence:  Enzymatic Nucleic Acid
uugucguggccgaaaggcgagugaggucucugugguu

SEQ ID NO: 10213 - RNA, 37 nt, Artificial Sequence
  Description of Artificial Sequence:  Enzymatic Nucleic Acid
uuucuauggccgaaaggcgagugaggucuuugucgug

SEQ ID NO: 10214 - RNA, 37 nt, Artificial Sequence
  Description of Artificial Sequence:  Enzymatic Nucleic Acid
ccucgauggccgaaaggcgagugaggucucucgauga

SEQ ID NO: 10215 - RNA, 37 nt, Artificial Sequence
  Description of Artificial Sequence:  Enzymatic Nucleic Acid
gggauggagccgaaaggcgagugaggucucucgaugc

SEQ ID NO: 10216 - RNA, 37 nt, Artificial Sequence
  Description of Artificial Sequence:  Enzymatic Nucleic Acid
uaugauaggccgaaaggcgagugaggucucagggucu

SEQ ID NO: 10217 - RNA, 37 nt, Artificial Sequence
  Description of Artificial Sequence:  Enzymatic Nucleic Acid
agcgaagagccgaaaggcgagugaggucuuaaggucu

SEQ ID NO: 10218 - RNA, 37 nt, Artificial Sequence
  Description of Artificial Sequence:  Enzymatic Nucleic Acid
uauaccaggccgaaaggcgagugaggucugaagacua

SEQ ID NO: 10219 - RNA, 37 nt, Artificial Sequence
  Description of Artificial Sequence:  Enzymatic Nucleic Acid
cgaguauagccgaaaggcgagugaggucucagcgaag

SEQ ID NO: 10220 - RNA, 37 nt, Artificial Sequence
  Description of Artificial Sequence:  Enzymatic Nucleic Acid
acagacaggccgaaaggcgagugaggucugaguauac

SEQ ID NO: 10221 - RNA, 37 nt, Artificial Sequence
  Description of Artificial Sequence:  Enzymatic Nucleic Acid
uugacagagccgaaaggcgagugaggucuagcgagua

SEQ ID NO: 10222 - RNA, 37 nt, Artificial Sequence
  Description of Artificial Sequence:  Enzymatic Nucleic Acid
cugguugagccgaaaggcgagugaggucuagacagcg

SEQ ID NO: 10223 - RNA, 37 nt, Artificial Sequence
  Description of Artificial Sequence:  Enzymatic Nucleic Acid
gucaaccggccgaaaggcgagugaggucuugguugac

SEQ ID NO: 10224 - RNA, 37 nt, Artificial Sequence
  Description of Artificial Sequence:  Enzymatic Nucleic Acid
aaagucaagccgaaaggcgagugaggucucgcugguu

SEQ ID NO: 10225 - RNA, 37 nt, Artificial Sequence
  Description of Artificial Sequence:  Enzymatic Nucleic Acid
aaagaagggccgaaaggcgagugaggucuuuaaaaaa

SEQ ID NO: 10226 - RNA, 37 nt, Artificial Sequence
  Description of Artificial Sequence:  Enzymatic Nucleic Acid
uccagaaagccgaaaggcgagugaggucuugguaaaa

SEQ ID NO: 10227 - RNA, 37 nt, Artificial Sequence
  Description of Artificial Sequence:  Enzymatic Nucleic Acid
ugaauuuggccgaaaggcgagugaggucuuccagaaa

SEQ ID NO: 10228 - RNA, 37 nt, Artificial Sequence
  Description of Artificial Sequence:  Enzymatic Nucleic Acid
aaggcaaagccgaaaggcgagugaggucuugaauuug

SEQ ID NO: 10229 - RNA, 37 nt, Artificial Sequence
  Description of Artificial Sequence:  Enzymatic Nucleic Acid
caggaagggccgaaaggcgagugaggucuaaacugaa

SEQ ID NO: 10230 - RNA, 37 nt, Artificial Sequence
  Description of Artificial Sequence:  Enzymatic Nucleic Acid
acaauuuagccgaaaggcgagugaggucuaaauccag

SEQ ID NO: 10231 - RNA, 37 nt, Artificial Sequence
  Description of Artificial Sequence:  Enzymatic Nucleic Acid
ggucauuagccgaaaggcgagugaggucuaauuuaca

SEQ ID NO: 10232 - RNA, 37 nt, Artificial Sequence
  Description of Artificial Sequence:  Enzymatic Nucleic Acid
aagaacuggccgaaaggcgagugaggucuuaaaguuu

SEQ ID NO: 10233 - RNA, 37 nt, Artificial Sequence
  Description of Artificial Sequence:  Enzymatic Nucleic Acid
uggaagaagccgaaaggcgagugaggucuugcuaaag

SEQ ID NO: 10234 - RNA, 37 nt, Artificial Sequence
  Description of Artificial Sequence:  Enzymatic Nucleic Acid
gaagcaaagccgaaaggcgagugaggucucugaguca

SEQ ID NO: 10235 - RNA, 37 nt, Artificial Sequence
  Description of Artificial Sequence:  Enzymatic Nucleic Acid
cagagaaggccgaaaggcgagugaggucuaaaccuga

SEQ ID NO: 10236 - RNA, 37 nt, Artificial Sequence
  Description of Artificial Sequence:  Enzymatic Nucleic Acid
gaagaccggccgaaaggcgagugaggucucagagaag

SEQ ID NO: 10237 - RNA, 37 nt, Artificial Sequence
  Description of Artificial Sequence:  Enzymatic Nucleic Acid
ucugaagagccgaaaggcgagugaggucucgccagag

SEQ ID NO: 10238 - RNA, 37 nt, Artificial Sequence
  Description of Artificial Sequence:  Enzymatic Nucleic Acid
gauaaucagccgaaaggcgagugaggucuggaagugu

SEQ ID NO: 10239 - RNA, 37 nt, Artificial Sequence
  Description of Artificial Sequence:  Enzymatic Nucleic Acid
aaugcacggccgaaaggcgagugaggucuagauaauc

SEQ ID NO: 10240 - RNA, 37 nt, Artificial Sequence
  Description of Artificial Sequence:  Enzymatic Nucleic Acid
aaaaugcagccgaaaggcgagugaggucugcagauaa

SEQ ID NO: 10241 - RNA, 37 nt, Artificial Sequence
  Description of Artificial Sequence:  Enzymatic Nucleic Acid
ccaaaauggccgaaaggcgagugaggucuacgcagau

SEQ ID NO: 10242 - RNA, 37 nt, Artificial Sequence
  Description of Artificial Sequence:  Enzymatic Nucleic Acid
guuggaaggccgaaaggcgagugaggucuuuugucca

SEQ ID NO: 10243 - RNA, 37 nt, Artificial Sequence
  Description of Artificial Sequence:  Enzymatic Nucleic Acid
aucaccaggccgaaaggcgagugaggucucauuucuu

SEQ ID NO: 10244 - RNA, 37 nt, Artificial Sequence
  Description of Artificial Sequence:  Enzymatic Nucleic Acid
aaagaucagccgaaaggcgagugaggucucagccauu

SEQ ID NO: 10245 - RNA, 37 nt, Artificial Sequence
  Description of Artificial Sequence:  Enzymatic Nucleic Acid
gaaaccuggccgaaaggcgagugaggucuugaaagau

SEQ ID NO: 10246 - RNA, 37 nt, Artificial Sequence
  Description of Artificial Sequence:  Enzymatic Nucleic Acid
ugaagaaagccgaaaggcgagugaggucucugcugaa

SEQ ID NO: 10247 - RNA, 37 nt, Artificial Sequence
  Description of Artificial Sequence:  Enzymatic Nucleic Acid
gcuucugagccgaaaggcgagugaggucugguaugua

SEQ ID NO: 10248 - RNA, 37 nt, Artificial Sequence
  Description of Artificial Sequence:  Enzymatic Nucleic Acid
acucccuggccgaaaggcgagugaggucuuucugacg

SEQ ID NO: 10249 - RNA, 37 nt, Artificial Sequence
  Description of Artificial Sequence:  Enzymatic Nucleic Acid
aaguacuagccgaaaggcgagugaggucuucccugcu

SEQ ID NO: 10250 - RNA, 37 nt, Artificial Sequence
  Description of Artificial Sequence:  Enzymatic Nucleic Acid
uuuaaguagccgaaaggcgagugaggucuuacucccu

SEQ ID NO: 10251 - RNA, 37 nt, Artificial Sequence
  Description of Artificial Sequence:  Enzymatic Nucleic Acid
gaauuagggccgaaaggcgagugaggucuaguucuug

SEQ ID NO: 10252 - RNA, 37 nt, Artificial Sequence
  Description of Artificial Sequence:  Enzymatic Nucleic Acid
aauguaaagccgaaaggcgagugaggucucuccuauc

SEQ ID NO: 10253 - RNA, 37 nt, Artificial Sequence
  Description of Artificial Sequence:  Enzymatic Nucleic Acid
uauuauaagccgaaaggcgagugaggucuuugaaaug

SEQ ID NO: 10254 - RNA, 37 nt, Artificial Sequence
  Description of Artificial Sequence:  Enzymatic Nucleic Acid
uaccuucagccgaaaggcgagugaggucucuucugga

SEQ ID NO: 10255 - RNA, 37 nt, Artificial Sequence
  Description of Artificial Sequence:  Enzymatic Nucleic Acid
uugaucuagccgaaaggcgagugaggucucuucaccu

SEQ ID NO: 10256 - RNA, 37 nt, Artificial Sequence
  Description of Artificial Sequence:  Enzymatic Nucleic Acid
auuuuuuggccgaaaggcgagugaggucuuuccuucu

SEQ ID NO: 10257 - RNA, 37 nt, Artificial Sequence
  Description of Artificial Sequence:  Enzymatic Nucleic Acid
ggcugcgggccgaaaggcgagugaggucuauuuuuug

SEQ ID NO: 10258 - RNA, 37 nt, Artificial Sequence
  Description of Artificial Sequence:  Enzymatic Nucleic Acid
uuuggcuggccgaaaggcgagugaggucuggcauuuu

SEQ ID NO: 10259 - RNA, 37 nt, Artificial Sequence
  Description of Artificial Sequence:  Enzymatic Nucleic Acid
uaauuugggccgaaaggcgagugaggucuugcggcau

SEQ ID NO: 10260 - RNA, 37 nt, Artificial Sequence
  Description of Artificial Sequence:  Enzymatic Nucleic Acid
cucaacaggccgaaaggcgagugaggucuuaauuugg

SEQ ID NO: 10261 - RNA, 37 nt, Artificial Sequence
  Description of Artificial Sequence:  Enzymatic Nucleic Acid
uaucucaagccgaaaggcgagugaggucuagcuaauu

SEQ ID NO: 10262 - RNA, 37 nt, Artificial Sequence
  Description of Artificial Sequence:  Enzymatic Nucleic Acid
acuaacuggccgaaaggcgagugaggucucuucuuuu

SEQ ID NO: 10263 - RNA, 37 nt, Artificial Sequence
  Description of Artificial Sequence:  Enzymatic Nucleic Acid
aggacuaagccgaaaggcgagugaggucuugccuucu

SEQ ID NO: 10264 - RNA, 37 nt, Artificial Sequence
  Description of Artificial Sequence:  Enzymatic Nucleic Acid
auaaaggagccgaaaggcgagugaggucuuaacugcc

SEQ ID NO: 10265 - RNA, 37 nt, Artificial Sequence
  Description of Artificial Sequence:  Enzymatic Nucleic Acid
ugauaagggccgaaaggcgagugaggucucuauguaa

SEQ ID NO: 10266 - RNA, 37 nt, Artificial Sequence
  Description of Artificial Sequence:  Enzymatic Nucleic Acid
cuucuggggccgaaaggcgagugaggucuaauucuau

SEQ ID NO: 10267 - RNA, 37 nt, Artificial Sequence
  Description of Artificial Sequence:  Enzymatic Nucleic Acid
auaauuuagccgaaaggcgagugaggucuaguuaguc

SEQ ID NO: 10268 - RNA, 37 nt, Artificial Sequence
  Description of Artificial Sequence:  Enzymatic Nucleic Acid
gaugcacagccgaaaggcgagugaggucuuguucaua

SEQ ID NO: 10269 - RNA, 37 nt, Artificial Sequence
  Description of Artificial Sequence:  Enzymatic Nucleic Acid
ccgaugcagccgaaaggcgagugaggucuacuguuca

SEQ ID NO: 10270 - RNA, 37 nt, Artificial Sequence
  Description of Artificial Sequence:  Enzymatic Nucleic Acid
ccccgauggccgaaaggcgagugaggucuacacuguu

SEQ ID NO: 10271 - RNA, 37 nt, Artificial Sequence
  Description of Artificial Sequence:  Enzymatic Nucleic Acid
cccaugcagccgaaaggcgagugaggucuccccgaug

SEQ ID NO: 10272 - RNA, 37 nt, Artificial Sequence
  Description of Artificial Sequence:  Enzymatic Nucleic Acid
ggcccauggccgaaaggcgagugaggucuacccccga

SEQ ID NO: 10273 - RNA, 37 nt, Artificial Sequence
  Description of Artificial Sequence:  Enzymatic Nucleic Acid
ccuucugggccgaaaggcgagugaggucuccaugcac

SEQ ID NO: 10274 - RNA, 37 nt, Artificial Sequence
  Description of Artificial Sequence:  Enzymatic Nucleic Acid
ccauuuuggccgaaaggcgagugaggucuauuuauaa

SEQ ID NO: 10275 - RNA, 37 nt, Artificial Sequence
  Description of Artificial Sequence:  Enzymatic Nucleic Acid
uaccaauagccgaaaggcgagugaggucuuauauucu

SEQ ID NO: 10276 - RNA, 37 nt, Artificial Sequence
  Description of Artificial Sequence:  Enzymatic Nucleic Acid
aaccuguagccgaaaggcgagugaggucucaauacua

SEQ ID NO: 10277 - RNA, 37 nt, Artificial Sequence
  Description of Artificial Sequence:  Enzymatic Nucleic Acid
uaguagaagccgaaaggcgagugaggucucuguacca

SEQ ID NO: 10278 - RNA, 37 nt, Artificial Sequence
  Description of Artificial Sequence:  Enzymatic Nucleic Acid
uuguuuuggccgaaaggcgagugaggucuuuccuguu

SEQ ID NO: 10279 - RNA, 37 nt, Artificial Sequence
  Description of Artificial Sequence:  Enzymatic Nucleic Acid
uuuagcgggccgaaaggcgagugaggucucaauuguu

SEQ ID NO: 10280 - RNA, 37 nt, Artificial Sequence
  Description of Artificial Sequence:  Enzymatic Nucleic Acid
aaguuuaggccgaaaggcgagugaggucuggccaauu

SEQ ID NO: 10281 - RNA, 37 nt, Artificial Sequence
  Description of Artificial Sequence:  Enzymatic Nucleic Acid
aagauauggccgaaaggcgagugaggucuaaguuuag

SEQ ID NO: 10282 - RNA, 37 nt, Artificial Sequence
  Description of Artificial Sequence:  Enzymatic Nucleic Acid
agauuucagccgaaaggcgagugaggucuugagguuu

SEQ ID NO: 10283 - RNA, 37 nt, Artificial Sequence
  Description of Artificial Sequence:  Enzymatic Nucleic Acid
ccagaggagccgaaaggcgagugaggucuagguaguc

SEQ ID NO: 10284 - RNA, 37 nt, Artificial Sequence
  Description of Artificial Sequence:  Enzymatic Nucleic Acid
caaaagaagccgaaaggcgagugaggucucagaggac

SEQ ID NO: 10285 - RNA, 37 nt, Artificial Sequence
  Description of Artificial Sequence:  Enzymatic Nucleic Acid
cguaguaggccgaaaggcgagugaggucuaaaagaac

SEQ ID NO: 10286 - RNA, 37 nt, Artificial Sequence
  Description of Artificial Sequence:  Enzymatic Nucleic Acid
gacucacagccgaaaggcgagugaggucuguaguagc

SEQ ID NO: 10287 - RNA, 37 nt, Artificial Sequence
  Description of Artificial Sequence:  Enzymatic Nucleic Acid
gggacucagccgaaaggcgagugaggucuacguagua

SEQ ID NO: 10288 - RNA, 37 nt, Artificial Sequence
  Description of Artificial Sequence:  Enzymatic Nucleic Acid
cuuugggagccgaaaggcgagugaggucuucacacgu

SEQ ID NO: 10289 - RNA, 37 nt, Artificial Sequence
  Description of Artificial Sequence:  Enzymatic Nucleic Acid
aagaguuggccgaaaggcgagugaggucuuuugggac

SEQ ID NO: 10290 - RNA, 37 nt, Artificial Sequence
  Description of Artificial Sequence:  Enzymatic Nucleic Acid
gcuggucagccgaaaggcgagugaggucuuaaagagu

SEQ ID NO: 10291 - RNA, 37 nt, Artificial Sequence
  Description of Artificial Sequence:  Enzymatic Nucleic Acid
cgaguguggccgaaaggcgagugaggucuuggucacu

SEQ ID NO: 10292 - RNA, 37 nt, Artificial Sequence
  Description of Artificial Sequence:  Enzymatic Nucleic Acid
uucagaaggccgaaaggcgagugaggucugagugugc

SEQ ID NO: 10293 - RNA, 37 nt, Artificial Sequence
  Description of Artificial Sequence:  Enzymatic Nucleic Acid
agaagucagccgaaaggcgagugaggucucuucagau

SEQ ID NO: 10294 - RNA, 37 nt, Artificial Sequence
  Description of Artificial Sequence:  Enzymatic Nucleic Acid
uguaucuggccgaaaggcgagugaggucuugagaagu

SEQ ID NO: 10295 - RNA, 37 nt, Artificial Sequence
  Description of Artificial Sequence:  Enzymatic Nucleic Acid
aacugucagccgaaaggcgagugaggucuuguuagaa

SEQ ID NO: 10296 - RNA, 37 nt, Artificial Sequence
  Description of Artificial Sequence:  Enzymatic Nucleic Acid
uguuuaaagccgaaaggcgagugaggucuugucacug

SEQ ID NO: 10297 - RNA, 37 nt, Artificial Sequence
  Description of Artificial Sequence:  Enzymatic Nucleic Acid
acgaagaagccgaaaggcgagugaggucuuguuuaaa

SEQ ID NO: 10298 - RNA, 37 nt, Artificial Sequence
  Description of Artificial Sequence:  Enzymatic Nucleic Acid
auaagcaagccgaaaggcgagugaggucugaagaacu

SEQ ID NO: 10299 - RNA, 37 nt, Artificial Sequence
  Description of Artificial Sequence:  Enzymatic Nucleic Acid
uucauaaggccgaaaggcgagugaggucuaacgaaga

SEQ ID NO: 10300 - RNA, 37 nt, Artificial Sequence
  Description of Artificial Sequence:  Enzymatic Nucleic Acid
uucugagagccgaaaggcgagugaggucucauucaua

SEQ ID NO: 10301 - RNA, 37 nt, Artificial Sequence
  Description of Artificial Sequence:  Enzymatic Nucleic Acid
ucuuuuuggccgaaaggcgagugaggucucuuccuuu

SEQ ID NO: 10302 - RNA, 37 nt, Artificial Sequence
  Description of Artificial Sequence:  Enzymatic Nucleic Acid
ucuggguggccgaaaggcgagugaggucucaaagauc

SEQ ID NO: 10303 - RNA, 37 nt, Artificial Sequence
  Description of Artificial Sequence:  Enzymatic Nucleic Acid
acaguauagccgaaaggcgagugaggucuuuuguuuc

SEQ ID NO: 10304 - RNA, 37 nt, Artificial Sequence
  Description of Artificial Sequence:  Enzymatic Nucleic Acid
cuuguccagccgaaaggcgagugaggucuaguauacu

SEQ ID NO: 10305 - RNA, 37 nt, Artificial Sequence
  Description of Artificial Sequence:  Enzymatic Nucleic Acid
augccaaagccgaaaggcgagugaggucucucuuguc

SEQ ID NO: 10306 - RNA, 37 nt, Artificial Sequence
  Description of Artificial Sequence:  Enzymatic Nucleic Acid
aauccauggccgaaaggcgagugaggucucaaaccuc

SEQ ID NO: 10307 - RNA, 37 nt, Artificial Sequence
  Description of Artificial Sequence:  Enzymatic Nucleic Acid
caccugaggccgaaaggcgagugaggucucaauuaau

SEQ ID NO: 10308 - RNA, 37 nt, Artificial Sequence
  Description of Artificial Sequence:  Enzymatic Nucleic Acid
caaauccagccgaaaggcgagugaggucucugagcca

SEQ ID NO: 10309 - RNA, 37 nt, Artificial Sequence
  Description of Artificial Sequence:  Enzymatic Nucleic Acid
aaacuugggccgaaaggcgagugaggucucaaaucca

SEQ ID NO: 10310 - RNA, 37 nt, Artificial Sequence
  Description of Artificial Sequence:  Enzymatic Nucleic Acid
uuugaaaagccgaaaggcgagugaggucuuuggccaa

SEQ ID NO: 10311 - RNA, 37 nt, Artificial Sequence
  Description of Artificial Sequence:  Enzymatic Nucleic Acid
guguuuuggccgaaaggcgagugaggucuuuugaaaa

SEQ ID NO: 10312 - RNA, 37 nt, Artificial Sequence
  Description of Artificial Sequence:  Enzymatic Nucleic Acid
uuuaauaagccgaaaggcgagugaggucuguaagucu

SEQ ID NO: 10313 - RNA, 37 nt, Artificial Sequence
  Description of Artificial Sequence:  Enzymatic Nucleic Acid
auuuaacagccgaaaggcgagugaggucuguuuaaua

SEQ ID NO: 10314 - RNA, 37 nt, Artificial Sequence
  Description of Artificial Sequence:  Enzymatic Nucleic Acid
auauuuaagccgaaaggcgagugaggucuacguuuaa

SEQ ID NO: 10315 - RNA, 37 nt, Artificial Sequence
  Description of Artificial Sequence:  Enzymatic Nucleic Acid
acgcuccggccgaaaggcgagugaggucucuucucgu

SEQ ID NO: 10316 - RNA, 37 nt, Artificial Sequence
  Description of Artificial Sequence:  Enzymatic Nucleic Acid
acuucacggccgaaaggcgagugaggucuuccgccuu

SEQ ID NO: 10317 - RNA, 37 nt, Artificial Sequence
  Description of Artificial Sequence:  Enzymatic Nucleic Acid
uuacuucagccgaaaggcgagugaggucugcuccgcc

SEQ ID NO: 10318 - RNA, 37 nt, Artificial Sequence
  Description of Artificial Sequence:  Enzymatic Nucleic Acid
ugcuuuuagccgaaaggcgagugaggucuuucacgcu

SEQ ID NO: 10319 - RNA, 37 nt, Artificial Sequence
  Description of Artificial Sequence:  Enzymatic Nucleic Acid
ugccaauggccgaaaggcgagugaggucuuuuuacuu

SEQ ID NO: 10320 - RNA, 37 nt, Artificial Sequence
  Description of Artificial Sequence:  Enzymatic Nucleic Acid
aaguuuuggccgaaaggcgagugaggucucaaugcuu

SEQ ID NO: 10321 - RNA, 37 nt, Artificial Sequence
  Description of Artificial Sequence:  Enzymatic Nucleic Acid
aauauuuagccgaaaggcgagugaggucuaugaucaa

SEQ ID NO: 10322 - RNA, 37 nt, Artificial Sequence
  Description of Artificial Sequence:  Enzymatic Nucleic Acid
guagugaagccgaaaggcgagugaggucuaauauuua

SEQ ID NO: 10323 - RNA, 37 nt, Artificial Sequence
  Description of Artificial Sequence:  Enzymatic Nucleic Acid
cccaacaggccgaaaggcgagugaggucucauuguag

SEQ ID NO: 10324 - RNA, 37 nt, Artificial Sequence
  Description of Artificial Sequence:  Enzymatic Nucleic Acid
caucccaagccgaaaggcgagugaggucuagccauug

SEQ ID NO: 10325 - RNA, 37 nt, Artificial Sequence
  Description of Artificial Sequence:  Enzymatic Nucleic Acid
aaucaucagccgaaaggcgagugaggucuuggucuca

SEQ ID NO: 10326 - RNA, 37 nt, Artificial Sequence
  Description of Artificial Sequence:  Enzymatic Nucleic Acid
aaucacuggccgaaaggcgagugaggucuucucaaga

SEQ ID NO: 10327 - RNA, 37 nt, Artificial Sequence
  Description of Artificial Sequence:  Enzymatic Nucleic Acid
cauaaucagccgaaaggcgagugaggucuugcucuca

SEQ ID NO: 10328 - RNA, 37 nt, Artificial Sequence
  Description of Artificial Sequence:  Enzymatic Nucleic Acid
uauuuuuggccgaaaggcgagugaggucuuguucuca

SEQ ID NO: 10329 - RNA, 37 nt, Artificial Sequence
  Description of Artificial Sequence:  Enzymatic Nucleic Acid
accuugaagccgaaaggcgagugaggucuuauuuuug

SEQ ID NO: 10330 - RNA, 37 nt, Artificial Sequence
  Description of Artificial Sequence:  Enzymatic Nucleic Acid
gucuuugagccgaaaggcgagugaggucucuugaacu

SEQ ID NO: 10331 - RNA, 37 nt, Artificial Sequence
  Description of Artificial Sequence:  Enzymatic Nucleic Acid
aaaaggcagccgaaaggcgagugaggucuuuagucuu

SEQ ID NO: 10332 - RNA, 37 nt, Artificial Sequence
  Description of Artificial Sequence:  Enzymatic Nucleic Acid
ugaaaagggccgaaaggcgagugaggucuacuuaguc

SEQ ID NO: 10333 - RNA, 37 nt, Artificial Sequence
  Description of Artificial Sequence:  Enzymatic Nucleic Acid
cuuuaucagccgaaaggcgagugaggucuagaauucc

SEQ ID NO: 10334 - RNA, 37 nt, Artificial Sequence
  Description of Artificial Sequence:  Enzymatic Nucleic Acid
guuucucggccgaaaggcgagugaggucucucuucuu

SEQ ID NO: 10335 - RNA, 37 nt, Artificial Sequence
  Description of Artificial Sequence:  Enzymatic Nucleic Acid
agccaaaagccgaaaggcgagugaggucuuuugucua

SEQ ID NO: 10336 - RNA, 37 nt, Artificial Sequence
  Description of Artificial Sequence:  Enzymatic Nucleic Acid
uuccaaaggccgaaaggcgagugaggucucaaaacuu

SEQ ID NO: 10337 - RNA, 37 nt, Artificial Sequence
  Description of Artificial Sequence:  Enzymatic Nucleic Acid
auaauccagccgaaaggcgagugaggucucccuuuug

SEQ ID NO: 10338 - RNA, 37 nt, Artificial Sequence
  Description of Artificial Sequence:  Enzymatic Nucleic Acid
uuacuugggccgaaaggcgagugaggucuuuaagauc

SEQ ID NO: 10339 - RNA, 37 nt, Artificial Sequence
  Description of Artificial Sequence:  Enzymatic Nucleic Acid
auauauuagccgaaaggcgagugaggucuuuggcuua

SEQ ID NO: 10340 - RNA, 37 nt, Artificial Sequence
  Description of Artificial Sequence:  Enzymatic Nucleic Acid
uguaucuagccgaaaggcgagugaggucuuaagaaua

SEQ ID NO: 10341 - RNA, 37 nt, Artificial Sequence
  Description of Artificial Sequence:  Enzymatic Nucleic Acid
aaucuuuagccgaaaggcgagugaggucuuuguuuug

SEQ ID NO: 10342 - RNA, 37 nt, Artificial Sequence
  Description of Artificial Sequence:  Enzymatic Nucleic Acid
agauguuagccgaaaggcgagugaggucuaaguccaa

SEQ ID NO: 10343 - RNA, 37 nt, Artificial Sequence
  Description of Artificial Sequence:  Enzymatic Nucleic Acid
cuuguucggccgaaaggcgagugaggucuuuuccauc

SEQ ID NO: 10344 - RNA, 37 nt, Artificial Sequence
  Description of Artificial Sequence:  Enzymatic Nucleic Acid
uucccuuagccgaaaggcgagugaggucuuccuuguu

SEQ ID NO: 10345 - RNA, 37 nt, Artificial Sequence
  Description of Artificial Sequence:  Enzymatic Nucleic Acid
auguaucggccgaaaggcgagugaggucuaaaguucc

SEQ ID NO: 10346 - RNA, 37 nt, Artificial Sequence
  Description of Artificial Sequence:  Enzymatic Nucleic Acid
guucuggggccgaaaggcgagugaggucuucauguau

SEQ ID NO: 10347 - RNA, 37 nt, Artificial Sequence
  Description of Artificial Sequence:  Enzymatic Nucleic Acid
uagucuuggccgaaaggcgagugaggucugaagaaau

SEQ ID NO: 10348 - RNA, 37 nt, Artificial Sequence
  Description of Artificial Sequence:  Enzymatic Nucleic Acid
gagguccagccgaaaggcgagugaggucuuuccuuuc

SEQ ID NO: 10349 - RNA, 37 nt, Artificial Sequence
  Description of Artificial Sequence:  Enzymatic Nucleic Acid
ccccaaaggccgaaaggcgagugaggucuguagaggu

SEQ ID NO: 10350 - RNA, 37 nt, Artificial Sequence
  Description of Artificial Sequence:  Enzymatic Nucleic Acid
agaauuaggccgaaaggcgagugaggucucccaaagc

SEQ ID NO: 10351 - RNA, 37 nt, Artificial Sequence
  Description of Artificial Sequence:  Enzymatic Nucleic Acid
aaguucaggccgaaaggcgagugaggucuaagaauua

SEQ ID NO: 10352 - RNA, 37 nt, Artificial Sequence
  Description of Artificial Sequence:  Enzymatic Nucleic Acid
gucacauagccgaaaggcgagugaggucuaugaagaa

SEQ ID NO: 10353 - RNA, 37 nt, Artificial Sequence
  Description of Artificial Sequence:  Enzymatic Nucleic Acid
cagugucagccgaaaggcgagugaggucuauacauga

SEQ ID NO: 10354 - RNA, 37 nt, Artificial Sequence
  Description of Artificial Sequence:  Enzymatic Nucleic Acid
uucaaaaggccgaaaggcgagugaggucuagugucac

SEQ ID NO: 10355 - RNA, 37 nt, Artificial Sequence
  Description of Artificial Sequence:  Enzymatic Nucleic Acid
gugaaaaagccgaaaggcgagugaggucuuuugaugu

SEQ ID NO: 10356 - RNA, 37 nt, Artificial Sequence
  Description of Artificial Sequence:  Enzymatic Nucleic Acid
agaugauggccgaaaggcgagugaggucucaucccgu

SEQ ID NO: 10357 - RNA, 37 nt, Artificial Sequence
  Description of Artificial Sequence:  Enzymatic Nucleic Acid
cuuccacagccgaaaggcgagugaggucuagucaagg

SEQ ID NO: 10358 - RNA, 37 nt, Artificial Sequence
  Description of Artificial Sequence:  Enzymatic Nucleic Acid
uucuuccagccgaaaggcgagugaggucuacagucaa

SEQ ID NO: 10359 - RNA, 37 nt, Artificial Sequence
  Description of Artificial Sequence:  Enzymatic Nucleic Acid
ucucuggggccgaaaggcgagugaggucuuuuucuuc

SEQ ID NO: 10360 - RNA, 37 nt, Artificial Sequence
  Description of Artificial Sequence:  Enzymatic Nucleic Acid
ggcucuaagccgaaaggcgagugaggucuaugugugu

SEQ ID NO: 10361 - RNA, 37 nt, Artificial Sequence
  Description of Artificial Sequence:  Enzymatic Nucleic Acid
cagaaggggccgaaaggcgagugaggucuucuaacau

SEQ ID NO: 10362 - RNA, 37 nt, Artificial Sequence
  Description of Artificial Sequence:  Enzymatic Nucleic Acid
gcaggauagccgaaaggcgagugaggucuuuuuucag

SEQ ID NO: 10363 - RNA, 37 nt, Artificial Sequence
  Description of Artificial Sequence:  Enzymatic Nucleic Acid
aucagaaggccgaaaggcgagugaggucuaggauacu

SEQ ID NO: 10364 - RNA, 37 nt, Artificial Sequence
  Description of Artificial Sequence:  Enzymatic Nucleic Acid
gaaaacuggccgaaaggcgagugaggucuauaucaga

SEQ ID NO: 10365 - RNA, 37 nt, Artificial Sequence
  Description of Artificial Sequence:  Enzymatic Nucleic Acid
aaggaaaagccgaaaggcgagugaggucuugcauauc

SEQ ID NO: 10366 - RNA, 37 nt, Artificial Sequence
  Description of Artificial Sequence:  Enzymatic Nucleic Acid
uucccuaggccgaaaggcgagugaggucuagauuuua

SEQ ID NO: 10367 - RNA, 37 nt, Artificial Sequence
  Description of Artificial Sequence:  Enzymatic Nucleic Acid
aaaggaaagccgaaaggcgagugaggucuauuaaaau

SEQ ID NO: 10368 - RNA, 37 nt, Artificial Sequence
  Description of Artificial Sequence:  Enzymatic Nucleic Acid
uguuucuggccgaaaggcgagugaggucuagaaagau

SEQ ID NO: 10369 - RNA, 37 nt, Artificial Sequence
  Description of Artificial Sequence:  Enzymatic Nucleic Acid
gaagaaaagccgaaaggcgagugaggucucuuucugu

SEQ ID NO: 10370 - RNA, 37 nt, Artificial Sequence
  Description of Artificial Sequence:  Enzymatic Nucleic Acid
uuuugaaggccgaaaggcgagugaggucuaaaaagaa

SEQ ID NO: 10371 - RNA, 37 nt, Artificial Sequence
  Description of Artificial Sequence:  Enzymatic Nucleic Acid
gagaugaggccgaaaggcgagugaggucucaggaaaa

SEQ ID NO: 10372 - RNA, 37 nt, Artificial Sequence
  Description of Artificial Sequence:  Enzymatic Nucleic Acid
gagcgagagccgaaaggcgagugaggucuucugucuu

SEQ ID NO: 10373 - RNA, 37 nt, Artificial Sequence
  Description of Artificial Sequence:  Enzymatic Nucleic Acid
caacagaggccgaaaggcgagugaggucugagacucu

SEQ ID NO: 10374 - RNA, 37 nt, Artificial Sequence
  Description of Artificial Sequence:  Enzymatic Nucleic Acid
cugggcaagccgaaaggcgagugaggucuagagcgag

SEQ ID NO: 10375 - RNA, 37 nt, Artificial Sequence
  Description of Artificial Sequence:  Enzymatic Nucleic Acid
agccuggggccgaaaggcgagugaggucuaacagagc

SEQ ID NO: 10376 - RNA, 37 nt, Artificial Sequence
  Description of Artificial Sequence:  Enzymatic Nucleic Acid
cacuccaggccgaaaggcgagugaggucucugggcaa

SEQ ID NO: 10377 - RNA, 37 nt, Artificial Sequence
  Description of Artificial Sequence:  Enzymatic Nucleic Acid
ucauugcagccgaaaggcgagugaggucuuccagccu

SEQ ID NO: 10378 - RNA, 37 nt, Artificial Sequence
  Description of Artificial Sequence:  Enzymatic Nucleic Acid
ugucauuggccgaaaggcgagugaggucuacuccagc

SEQ ID NO: 10379 - RNA, 37 nt, Artificial Sequence
  Description of Artificial Sequence:  Enzymatic Nucleic Acid
agccaagagccgaaaggcgagugaggucuugugucau

SEQ ID NO: 10380 - RNA, 37 nt, Artificial Sequence
  Description of Artificial Sequence:  Enzymatic Nucleic Acid
gcagugaggccgaaaggcgagugaggucucaagacug

SEQ ID NO: 10381 - RNA, 37 nt, Artificial Sequence
  Description of Artificial Sequence:  Enzymatic Nucleic Acid
agaaguuggccgaaaggcgagugaggucuagugagcc

SEQ ID NO: 10382 - RNA, 37 nt, Artificial Sequence
  Description of Artificial Sequence:  Enzymatic Nucleic Acid
ccaagagggccgaaaggcgagugaggucuagaaguug

SEQ ID NO: 10383 - RNA, 37 nt, Artificial Sequence
  Description of Artificial Sequence:  Enzymatic Nucleic Acid
cacuugaagccgaaaggcgagugaggucuccaagagg

SEQ ID NO: 10384 - RNA, 37 nt, Artificial Sequence
  Description of Artificial Sequence:  Enzymatic Nucleic Acid
gagaaucagccgaaaggcgagugaggucuuugaaccc

SEQ ID NO: 10385 - RNA, 37 nt, Artificial Sequence
  Description of Artificial Sequence:  Enzymatic Nucleic Acid
ggcugagggccgaaaggcgagugaggucuaggagaau

SEQ ID NO: 10386 - RNA, 37 nt, Artificial Sequence
  Description of Artificial Sequence:  Enzymatic Nucleic Acid
ucaggagggccgaaaggcgagugaggucuugaggcag

SEQ ID NO: 10387 - RNA, 37 nt, Artificial Sequence
  Description of Artificial Sequence:  Enzymatic Nucleic Acid
uccagcuagccgaaaggcgagugaggucuucaggagg

SEQ ID NO: 10388 - RNA, 37 nt, Artificial Sequence
  Description of Artificial Sequence:  Enzymatic Nucleic Acid
uaauccaggccgaaaggcgagugaggucuuacucagg

SEQ ID NO: 10389 - RNA, 37 nt, Artificial Sequence
  Description of Artificial Sequence:  Enzymatic Nucleic Acid
ggcacauggccgaaaggcgagugaggucucuguaauc

SEQ ID NO: 10390 - RNA, 37 nt, Artificial Sequence
  Description of Artificial Sequence:  Enzymatic Nucleic Acid
ggguggcagccgaaaggcgagugaggucuaugccugu

SEQ ID NO: 10391 - RNA, 37 nt, Artificial Sequence
  Description of Artificial Sequence:  Enzymatic Nucleic Acid
gugggugggccgaaaggcgagugaggucuacaugccu

SEQ ID NO: 10392 - RNA, 37 nt, Artificial Sequence
  Description of Artificial Sequence:  Enzymatic Nucleic Acid
uaaaaacagccgaaaggcgagugaggucuaaaaauua

SEQ ID NO: 10393 - RNA, 37 nt, Artificial Sequence
  Description of Artificial Sequence:  Enzymatic Nucleic Acid
auuaaaaagccgaaaggcgagugaggucuacaaaaau

SEQ ID NO: 10394 - RNA, 37 nt, Artificial Sequence
  Description of Artificial Sequence:  Enzymatic Nucleic Acid
uggugaaagccgaaaggcgagugaggucuccugucuu

SEQ ID NO: 10395 - RNA, 37 nt, Artificial Sequence
  Description of Artificial Sequence:  Enzymatic Nucleic Acid
cuggccaagccgaaaggcgagugaggucuauggugaa

SEQ ID NO: 10396 - RNA, 37 nt, Artificial Sequence
  Description of Artificial Sequence:  Enzymatic Nucleic Acid
cagccugggccgaaaggcgagugaggucucaacaugg

SEQ ID NO: 10397 - RNA, 37 nt, Artificial Sequence
  Description of Artificial Sequence:  Enzymatic Nucleic Acid
gagaccaggccgaaaggcgagugaggucucuggccaa

SEQ ID NO: 10398 - RNA, 37 nt, Artificial Sequence
  Description of Artificial Sequence:  Enzymatic Nucleic Acid
guuugagagccgaaaggcgagugaggucucagccugg

SEQ ID NO: 10399 - RNA, 37 nt, Artificial Sequence
  Description of Artificial Sequence:  Enzymatic Nucleic Acid
guggauuagccgaaaggcgagugaggucuuugagguc

SEQ ID NO: 10400 - RNA, 37 nt, Artificial Sequence
  Description of Artificial Sequence:  Enzymatic Nucleic Acid
ggccgagggccgaaaggcgagugaggucuagguggau

SEQ ID NO: 10401 - RNA, 37 nt, Artificial Sequence
  Description of Artificial Sequence:  Enzymatic Nucleic Acid
uugggagggccgaaaggcgagugaggucucgaggcag

SEQ ID NO: 10402 - RNA, 37 nt, Artificial Sequence
  Description of Artificial Sequence:  Enzymatic Nucleic Acid
ucccagcagccgaaaggcgagugaggucuuuugggag

SEQ ID NO: 10403 - RNA, 37 nt, Artificial Sequence
  Description of Artificial Sequence:  Enzymatic Nucleic Acid
aaucccaggccgaaaggcgagugaggucuacuuuggg

SEQ ID NO: 10404 - RNA, 37 nt, Artificial Sequence
  Description of Artificial Sequence:  Enzymatic Nucleic Acid
cgcggugggccgaaaggcgagugaggucuucaucccu

SEQ ID NO: 10405 - RNA, 37 nt, Artificial Sequence
  Description of Artificial Sequence:  Enzymatic Nucleic Acid
gcugggcggccgaaaggcgagugaggucugguggcuc

SEQ ID NO: 10406 - RNA, 37 nt, Artificial Sequence
  Description of Artificial Sequence:  Enzymatic Nucleic Acid
aggcuggggccgaaaggcgagugaggucugcgguggc

SEQ ID NO: 10407 - RNA, 37 nt, Artificial Sequence
  Description of Artificial Sequence:  Enzymatic Nucleic Acid
agaugagggccgaaaggcgagugaggucuugggcgcg

SEQ ID NO: 10408 - RNA, 37 nt, Artificial Sequence
  Description of Artificial Sequence:  Enzymatic Nucleic Acid
cuuuagaagccgaaaggcgagugaggucuaaagagau

SEQ ID NO: 10409 - RNA, 37 nt, Artificial Sequence
  Description of Artificial Sequence:  Enzymatic Nucleic Acid
ccuaaaaggccgaaaggcgagugaggucugguagaaa

SEQ ID NO: 10410 - RNA, 37 nt, Artificial Sequence
  Description of Artificial Sequence:  Enzymatic Nucleic Acid
uuuuuugggccgaaaggcgagugaggucucuaaaagc

SEQ ID NO: 10411 - RNA, 37 nt, Artificial Sequence
  Description of Artificial Sequence:  Enzymatic Nucleic Acid
cgaucuuagccgaaaggcgagugaggucuauuuuuuu

SEQ ID NO: 10412 - RNA, 37 nt, Artificial Sequence
  Description of Artificial Sequence:  Enzymatic Nucleic Acid
gcagagaagccgaaaggcgagugaggucugaucuuac

SEQ ID NO: 10413 - RNA, 37 nt, Artificial Sequence
  Description of Artificial Sequence:  Enzymatic Nucleic Acid
augugagggccgaaaggcgagugaggucuagagaacg

SEQ ID NO: 10414 - RNA, 37 nt, Artificial Sequence
  Description of Artificial Sequence:  Enzymatic Nucleic Acid
cuuguaaggccgaaaggcgagugaggucuuaugugag

SEQ ID NO: 10415 - RNA, 37 nt, Artificial Sequence
  Description of Artificial Sequence:  Enzymatic Nucleic Acid
ccagcugggccgaaaggcgagugaggucuuuguaagc

SEQ ID NO: 10416 - RNA, 37 nt, Artificial Sequence
  Description of Artificial Sequence:  Enzymatic Nucleic Acid
uucuccaggccgaaaggcgagugaggucuuggcuugu

SEQ ID NO: 10417 - RNA, 37 nt, Artificial Sequence
  Description of Artificial Sequence:  Enzymatic Nucleic Acid
aaugaguagccgaaaggcgagugaggucucauauuuc

SEQ ID NO: 10418 - RNA, 37 nt, Artificial Sequence
  Description of Artificial Sequence:  Enzymatic Nucleic Acid
guacaucagccgaaaggcgagugaggucuuuuuuuuu

SEQ ID NO: 10419 - DNA, 31 bp, Artificial Sequence
  Description of Artificial Sequence:  Enzymatic Nucleic Acid
ctgcgccgggctagctacaacgacgccgccg

SEQ ID NO: 10420 - DNA, 31 bp, Artificial Sequence
  Description of Artificial Sequence:  Enzymatic Nucleic Acid
aaactgcgggctagctacaacgacgccgccg

SEQ ID NO: 10421 - DNA, 31 bp, Artificial Sequence
  Description of Artificial Sequence:  Enzymatic Nucleic Acid
gcaaactgggctagctacaacgagccgccgc

SEQ ID NO: 10422 - DNA, 31 bp, Artificial Sequence
  Description of Artificial Sequence:  Enzymatic Nucleic Acid
tgagcaaaggctagctacaacgatgcgccgc

SEQ ID NO: 10423 - DNA, 31 bp, Artificial Sequence
  Description of Artificial Sequence:  Enzymatic Nucleic Acid
agtatgagggctagctacaacgaaaactgcg

SEQ ID NO: 10424 - DNA, 31 bp, Artificial Sequence
  Description of Artificial Sequence:  Enzymatic Nucleic Acid
acaaagtaggctagctacaacgagagcaaac

SEQ ID NO: 10425 - DNA, 31 bp, Artificial Sequence
  Description of Artificial Sequence:  Enzymatic Nucleic Acid
tcacaaagggctagctacaacgaatgagcaa

SEQ ID NO: 10426 - DNA, 31 bp, Artificial Sequence
  Description of Artificial Sequence:  Enzymatic Nucleic Acid
gcaagtcaggctagctacaacgaaaagtatg

SEQ ID NO: 10427 - DNA, 31 bp, Artificial Sequence
  Description of Artificial Sequence:  Enzymatic Nucleic Acid
accgcaagggctagctacaacgacacaaagt

SEQ ID NO: 10428 - DNA, 31 bp, Artificial Sequence
  Description of Artificial Sequence:  Enzymatic Nucleic Acid
tgtgaccgggctagctacaacgaaagtcaca

SEQ ID NO: 10429 - DNA, 31 bp, Artificial Sequence
  Description of Artificial Sequence:  Enzymatic Nucleic Acid
cactgtgaggctagctacaacgacgcaagtc

SEQ ID NO: 10430 - DNA, 31 bp, Artificial Sequence
  Description of Artificial Sequence:  Enzymatic Nucleic Acid
tgccactgggctagctacaacgagaccgcaa

SEQ ID NO: 10431 - DNA, 31 bp, Artificial Sequence
  Description of Artificial Sequence:  Enzymatic Nucleic Acid
gaatgccaggctagctacaacgatgtgaccg

SEQ ID NO: 10432 - DNA, 31 bp, Artificial Sequence
  Description of Artificial Sequence:  Enzymatic Nucleic Acid
gctgaatgggctagctacaacgacactgtga

SEQ ID NO: 10433 - DNA, 31 bp, Artificial Sequence
  Description of Artificial Sequence:  Enzymatic Nucleic Acid
gagctgaaggctagctacaacgagccactgt

SEQ ID NO: 10434 - DNA, 31 bp, Artificial Sequence
  Description of Artificial Sequence:  Enzymatic Nucleic Acid
gtgtggagggctagctacaacgatgaatgcc

SEQ ID NO: 10435 - DNA, 31 bp, Artificial Sequence
  Description of Artificial Sequence:  Enzymatic Nucleic Acid
accaagtgggctagctacaacgaggagctga

SEQ ID NO: 10436 - DNA, 31 bp, Artificial Sequence
  Description of Artificial Sequence:  Enzymatic Nucleic Acid
ctaccaagggctagctacaacgagtggagct

SEQ ID NO: 10437 - DNA, 31 bp, Artificial Sequence
  Description of Artificial Sequence:  Enzymatic Nucleic Acid
tggttctaggctagctacaacgacaagtgtg

SEQ ID NO: 10438 - DNA, 31 bp, Artificial Sequence
  Description of Artificial Sequence:  Enzymatic Nucleic Acid
gcctgtggggctagctacaacgatctaccaa

SEQ ID NO: 10439 - DNA, 31 bp, Artificial Sequence
  Description of Artificial Sequence:  Enzymatic Nucleic Acid
cgtgcctgggctagctacaacgaggttctac

SEQ ID NO: 10440 - DNA, 31 bp, Artificial Sequence
  Description of Artificial Sequence:  Enzymatic Nucleic Acid
ttgtcgtgggctagctacaacgactgtggtt

SEQ ID NO: 10441 - DNA, 31 bp, Artificial Sequence
  Description of Artificial Sequence:  Enzymatic Nucleic Acid
gcttgtcgggctagctacaacgagcctgtgg

SEQ ID NO: 10442 - DNA, 31 bp, Artificial Sequence
  Description of Artificial Sequence:  Enzymatic Nucleic Acid
tatgcttgggctagctacaacgacgtgcctg

SEQ ID NO: 10443 - DNA, 31 bp, Artificial Sequence
  Description of Artificial Sequence:  Enzymatic Nucleic Acid
tttctatgggctagctacaacgattgtcgtg

SEQ ID NO: 10444 - DNA, 31 bp, Artificial Sequence
  Description of Artificial Sequence:  Enzymatic Nucleic Acid
tgtttctaggctagctacaacgagcttgtcg

SEQ ID NO: 10445 - DNA, 31 bp, Artificial Sequence
  Description of Artificial Sequence:  Enzymatic Nucleic Acid
ttaggatgggctagctacaacgattctatgc

SEQ ID NO: 10446 - DNA, 31 bp, Artificial Sequence
  Description of Artificial Sequence:  Enzymatic Nucleic Acid
gtttaggaggctagctacaacgagtttctat

SEQ ID NO: 10447 - DNA, 31 bp, Artificial Sequence
  Description of Artificial Sequence:  Enzymatic Nucleic Acid
gaagattgggctagctacaacgattaggatg

SEQ ID NO: 10448 - DNA, 31 bp, Artificial Sequence
  Description of Artificial Sequence:  Enzymatic Nucleic Acid
gatgaagaggctagctacaacgatgtttagg

SEQ ID NO: 10449 - DNA, 31 bp, Artificial Sequence
  Description of Artificial Sequence:  Enzymatic Nucleic Acid
tgcctcgaggctagctacaacgagaagattg

SEQ ID NO: 10450 - DNA, 31 bp, Artificial Sequence
  Description of Artificial Sequence:  Enzymatic Nucleic Acid
cctcgatgggctagctacaacgactcgatga

SEQ ID NO: 10451 - DNA, 31 bp, Artificial Sequence
  Description of Artificial Sequence:  Enzymatic Nucleic Acid
gacctcgaggctagctacaacgagcctcgat

SEQ ID NO: 10452 - DNA, 31 bp, Artificial Sequence
  Description of Artificial Sequence:  Enzymatic Nucleic Acid
gggatggaggctagctacaacgactcgatgc

SEQ ID NO: 10453 - DNA, 31 bp, Artificial Sequence
  Description of Artificial Sequence:  Enzymatic Nucleic Acid
tattgggaggctagctacaacgaggacctcg

SEQ ID NO: 10454 - DNA, 31 bp, Artificial Sequence
  Description of Artificial Sequence:  Enzymatic Nucleic Acid
gatttttaggctagctacaacgatgggatgg

SEQ ID NO: 10455 - DNA, 31 bp, Artificial Sequence
  Description of Artificial Sequence:  Enzymatic Nucleic Acid
tctcctgaggctagctacaacgattttattg

SEQ ID NO: 10456 - DNA, 31 bp, Artificial Sequence
  Description of Artificial Sequence:  Enzymatic Nucleic Acid
agccagggggctagctacaacgactcctgat

SEQ ID NO: 10457 - DNA, 31 bp, Artificial Sequence
  Description of Artificial Sequence:  Enzymatic Nucleic Acid
tatgatagggctagctacaacgacagggtct

SEQ ID NO: 10458 - DNA, 31 bp, Artificial Sequence
  Description of Artificial Sequence:  Enzymatic Nucleic Acid
gtctatgaggctagctacaacgaagccaggg

SEQ ID NO: 10459 - DNA, 31 bp, Artificial Sequence
  Description of Artificial Sequence:  Enzymatic Nucleic Acid
aaggtctaggctagctacaacgagatagcca

SEQ ID NO: 10460 - DNA, 31 bp, Artificial Sequence
  Description of Artificial Sequence:  Enzymatic Nucleic Acid
gactaaggggctagctacaacgactatgata

SEQ ID NO: 10461 - DNA, 31 bp, Artificial Sequence
  Description of Artificial Sequence:  Enzymatic Nucleic Acid
agcgaagaggctagctacaacgataaggtct

SEQ ID NO: 10462 - DNA, 31 bp, Artificial Sequence
  Description of Artificial Sequence:  Enzymatic Nucleic Acid
tataccagggctagctacaacgagaagacta

SEQ ID NO: 10463 - DNA, 31 bp, Artificial Sequence
  Description of Artificial Sequence:  Enzymatic Nucleic Acid
cgagtataggctagctacaacgacagcgaag

SEQ ID NO: 10464 - DNA, 31 bp, Artificial Sequence
  Description of Artificial Sequence:  Enzymatic Nucleic Acid
agcgagtaggctagctacaacgaaccagcga

SEQ ID NO: 10465 - DNA, 31 bp, Artificial Sequence
  Description of Artificial Sequence:  Enzymatic Nucleic Acid
acagcgagggctagctacaacgaataccagc

SEQ ID NO: 10466 - DNA, 31 bp, Artificial Sequence
  Description of Artificial Sequence:  Enzymatic Nucleic Acid
acagacagggctagctacaacgagagtatac

SEQ ID NO: 10467 - DNA, 31 bp, Artificial Sequence
  Description of Artificial Sequence:  Enzymatic Nucleic Acid
ttgacagaggctagctacaacgaagcgagta

SEQ ID NO: 10468 - DNA, 31 bp, Artificial Sequence
  Description of Artificial Sequence:  Enzymatic Nucleic Acid
ctggttgaggctagctacaacgaagacagcg

SEQ ID NO: 10469 - DNA, 31 bp, Artificial Sequence
  Description of Artificial Sequence:  Enzymatic Nucleic Acid
accgctggggctagctacaacgatgacagac

SEQ ID NO: 10470 - DNA, 31 bp, Artificial Sequence
  Description of Artificial Sequence:  Enzymatic Nucleic Acid
gtcaaccgggctagctacaacgatggttgac

SEQ ID NO: 10471 - DNA, 31 bp, Artificial Sequence
  Description of Artificial Sequence:  Enzymatic Nucleic Acid
aaagtcaaggctagctacaacgacgctggtt

SEQ ID NO: 10472 - DNA, 31 bp, Artificial Sequence
  Description of Artificial Sequence:  Enzymatic Nucleic Acid
aaaaaaagggctagctacaacgacaaccgct

SEQ ID NO: 10473 - DNA, 31 bp, Artificial Sequence
  Description of Artificial Sequence:  Enzymatic Nucleic Acid
aaagaaggggctagctacaacgattaaaaaa

SEQ ID NO: 10474 - DNA, 31 bp, Artificial Sequence
  Description of Artificial Sequence:  Enzymatic Nucleic Acid
gaaactggggctagctacaacgaaaaagaga

SEQ ID NO: 10475 - DNA, 31 bp, Artificial Sequence
  Description of Artificial Sequence:  Enzymatic Nucleic Acid
tccagaaaggctagctacaacgatggtaaaa

SEQ ID NO: 10476 - DNA, 31 bp, Artificial Sequence
  Description of Artificial Sequence:  Enzymatic Nucleic Acid
tgaatttgggctagctacaacgatccagaaa

SEQ ID NO: 10477 - DNA, 31 bp, Artificial Sequence
  Description of Artificial Sequence:  Enzymatic Nucleic Acid
aaactgaaggctagctacaacgattgctcca

SEQ ID NO: 10478 - DNA, 31 bp, Artificial Sequence
  Description of Artificial Sequence:  Enzymatic Nucleic Acid
aaggcaaaggctagctacaacgatgaatttg

SEQ ID NO: 10479 - DNA, 31 bp, Artificial Sequence
  Description of Artificial Sequence:  Enzymatic Nucleic Acid
caggaaggggctagctacaacgaaaactgaa

SEQ ID NO: 10480 - DNA, 31 bp, Artificial Sequence
  Description of Artificial Sequence:  Enzymatic Nucleic Acid
tttacaaaggctagctacaacgaccaggaag

SEQ ID NO: 10481 - DNA, 31 bp, Artificial Sequence
  Description of Artificial Sequence:  Enzymatic Nucleic Acid
acaatttaggctagctacaacgaaaatccag

SEQ ID NO: 10482 - DNA, 31 bp, Artificial Sequence
  Description of Artificial Sequence:  Enzymatic Nucleic Acid
cattacaaggctagctacaacgattacaaat

SEQ ID NO: 10483 - DNA, 31 bp, Artificial Sequence
  Description of Artificial Sequence:  Enzymatic Nucleic Acid
ggtcattaggctagctacaacgaaatttaca

SEQ ID NO: 10484 - DNA, 31 bp, Artificial Sequence
  Description of Artificial Sequence:  Enzymatic Nucleic Acid
tgaggtcaggctagctacaacgatacaattt

SEQ ID NO: 10485 - DNA, 31 bp, Artificial Sequence
  Description of Artificial Sequence:  Enzymatic Nucleic Acid
ttttgaggggctagctacaacgacattacaa

SEQ ID NO: 10486 - DNA, 31 bp, Artificial Sequence
  Description of Artificial Sequence:  Enzymatic Nucleic Acid
tgctaaagggctagctacaacgatttgaggt

SEQ ID NO: 10487 - DNA, 31 bp, Artificial Sequence
  Description of Artificial Sequence:  Enzymatic Nucleic Acid
aagaactgggctagctacaacgataaagttt

SEQ ID NO: 10488 - DNA, 31 bp, Artificial Sequence
  Description of Artificial Sequence:  Enzymatic Nucleic Acid
tggaagaaggctagctacaacgatgctaaag

SEQ ID NO: 10489 - DNA, 31 bp, Artificial Sequence
  Description of Artificial Sequence:  Enzymatic Nucleic Acid
gagtcagaggctagctacaacgaggaagaac

SEQ ID NO: 10490 - DNA, 31 bp, Artificial Sequence
  Description of Artificial Sequence:  Enzymatic Nucleic Acid
aacctgagggctagctacaacgacagatgga

SEQ ID NO: 10491 - DNA, 31 bp, Artificial Sequence
  Description of Artificial Sequence:  Enzymatic Nucleic Acid
gaagcaaaggctagctacaacgactgagtca

SEQ ID NO: 10492 - DNA, 31 bp, Artificial Sequence
  Description of Artificial Sequence:  Enzymatic Nucleic Acid
cagagaagggctagctacaacgaaaacctga

SEQ ID NO: 10493 - DNA, 31 bp, Artificial Sequence
  Description of Artificial Sequence:  Enzymatic Nucleic Acid
gaagaccgggctagctacaacgacagagaag

SEQ ID NO: 10494 - DNA, 31 bp, Artificial Sequence
  Description of Artificial Sequence:  Enzymatic Nucleic Acid
tctgaagaggctagctacaacgacgccagag

SEQ ID NO: 10495 - DNA, 31 bp, Artificial Sequence
  Description of Artificial Sequence:  Enzymatic Nucleic Acid
gatgttgaggctagctacaacgatctgaaga

SEQ ID NO: 10496 - DNA, 31 bp, Artificial Sequence
  Description of Artificial Sequence:  Enzymatic Nucleic Acid
tgtggatgggctagctacaacgatgattctg

SEQ ID NO: 10497 - DNA, 31 bp, Artificial Sequence
  Description of Artificial Sequence:  Enzymatic Nucleic Acid
agtgtggaggctagctacaacgagttgattc

SEQ ID NO: 10498 - DNA, 31 bp, Artificial Sequence
  Description of Artificial Sequence:  Enzymatic Nucleic Acid
cggaagtgggctagctacaacgaggatgttg

SEQ ID NO: 10499 - DNA, 31 bp, Artificial Sequence
  Description of Artificial Sequence:  Enzymatic Nucleic Acid
cacggaagggctagctacaacgagtggatgt

SEQ ID NO: 10500 - DNA, 31 bp, Artificial Sequence
  Description of Artificial Sequence:  Enzymatic Nucleic Acid
gataatcaggctagctacaacgaggaagtgt

SEQ ID NO: 10501 - DNA, 31 bp, Artificial Sequence
  Description of Artificial Sequence:  Enzymatic Nucleic Acid
gcagataaggctagctacaacgacacggaag

SEQ ID NO: 10502 - DNA, 31 bp, Artificial Sequence
  Description of Artificial Sequence:  Enzymatic Nucleic Acid
cacgcagaggctagctacaacgaaatcacgg

SEQ ID NO: 10503 - DNA, 31 bp, Artificial Sequence
  Description of Artificial Sequence:  Enzymatic Nucleic Acid
aatgcacgggctagctacaacgaagataatc

SEQ ID NO: 10504 - DNA, 31 bp, Artificial Sequence
  Description of Artificial Sequence:  Enzymatic Nucleic Acid
aaaatgcaggctagctacaacgagcagataa

SEQ ID NO: 10505 - DNA, 31 bp, Artificial Sequence
  Description of Artificial Sequence:  Enzymatic Nucleic Acid
ccaaaatgggctagctacaacgaacgcagat

SEQ ID NO: 10506 - DNA, 31 bp, Artificial Sequence
  Description of Artificial Sequence:  Enzymatic Nucleic Acid
gtccaaaaggctagctacaacgagcacgcag

SEQ ID NO: 10507 - DNA, 31 bp, Artificial Sequence
  Description of Artificial Sequence:  Enzymatic Nucleic Acid
aagctttgggctagctacaacgaccaaaatg

SEQ ID NO: 10508 - DNA, 31 bp, Artificial Sequence
  Description of Artificial Sequence:  Enzymatic Nucleic Acid
gttggaagggctagctacaacgatttgtcca

SEQ ID NO: 10509 - DNA, 31 bp, Artificial Sequence
  Description of Artificial Sequence:  Enzymatic Nucleic Acid
tatcctggggctagctacaacgatggaagct

SEQ ID NO: 10510 - DNA, 31 bp, Artificial Sequence
  Description of Artificial Sequence:  Enzymatic Nucleic Acid
ttcccgtaggctagctacaacgacctggttg

SEQ ID NO: 10511 - DNA, 31 bp, Artificial Sequence
  Description of Artificial Sequence:  Enzymatic Nucleic Acid
tcttcccgggctagctacaacgaatcctggt

SEQ ID NO: 10512 - DNA, 31 bp, Artificial Sequence
  Description of Artificial Sequence:  Enzymatic Nucleic Acid
accagccaggctagctacaacgattcttctt

SEQ ID NO: 10513 - DNA, 31 bp, Artificial Sequence
  Description of Artificial Sequence:  Enzymatic Nucleic Acid
atcaccagggctagctacaacgacatttctt

SEQ ID NO: 10514 - DNA, 31 bp, Artificial Sequence
  Description of Artificial Sequence:  Enzymatic Nucleic Acid
aaagatcaggctagctacaacgacagccatt

SEQ ID NO: 10515 - DNA, 31 bp, Artificial Sequence
  Description of Artificial Sequence:  Enzymatic Nucleic Acid
ctgaaagaggctagctacaacgacaccagcc

SEQ ID NO: 10516 - DNA, 31 bp, Artificial Sequence
  Description of Artificial Sequence:  Enzymatic Nucleic Acid
gaaacctgggctagctacaacgatgaaagat

SEQ ID NO: 10517 - DNA, 31 bp, Artificial Sequence
  Description of Artificial Sequence:  Enzymatic Nucleic Acid
tgaagaaaggctagctacaacgactgctgaa

SEQ ID NO: 10518 - DNA, 31 bp, Artificial Sequence
  Description of Artificial Sequence:  Enzymatic Nucleic Acid
ttcctccaggctagctacaacgagaagaaac

SEQ ID NO: 10519 - DNA, 31 bp, Artificial Sequence
  Description of Artificial Sequence:  Enzymatic Nucleic Acid
gtattaagggctagctacaacgatcctccat

SEQ ID NO: 10520 - DNA, 31 bp, Artificial Sequence
  Description of Artificial Sequence:  Enzymatic Nucleic Acid
ggtatgtaggctagctacaacgataagttcc

SEQ ID NO: 10521 - DNA, 31 bp, Artificial Sequence
  Description of Artificial Sequence:  Enzymatic Nucleic Acid
acggtatgggctagctacaacgaattaagtt

SEQ ID NO: 10522 - DNA, 31 bp, Artificial Sequence
  Description of Artificial Sequence:  Enzymatic Nucleic Acid
tgacggtaggctagctacaacgagtattaag

SEQ ID NO: 10523 - DNA, 31 bp, Artificial Sequence
  Description of Artificial Sequence:  Enzymatic Nucleic Acid
tctgacggggctagctacaacgaatgtatta

SEQ ID NO: 10524 - DNA, 31 bp, Artificial Sequence
  Description of Artificial Sequence:  Enzymatic Nucleic Acid
gcttctgaggctagctacaacgaggtatgta

SEQ ID NO: 10525 - DNA, 31 bp, Artificial Sequence
  Description of Artificial Sequence:  Enzymatic Nucleic Acid
actccctgggctagctacaacgattctgacg

SEQ ID NO: 10526 - DNA, 31 bp, Artificial Sequence
  Description of Artificial Sequence:  Enzymatic Nucleic Acid
aagtactaggctagctacaacgatccctgct

SEQ ID NO: 10527 - DNA, 31 bp, Artificial Sequence
  Description of Artificial Sequence:  Enzymatic Nucleic Acid
tttaagtaggctagctacaacgatactccct

SEQ ID NO: 10528 - DNA, 31 bp, Artificial Sequence
  Description of Artificial Sequence:  Enzymatic Nucleic Acid
tatttaagggctagctacaacgaactactcc

SEQ ID NO: 10529 - DNA, 31 bp, Artificial Sequence
  Description of Artificial Sequence:  Enzymatic Nucleic Acid
tcttgataggctagctacaacgattaagtac

SEQ ID NO: 10530 - DNA, 31 bp, Artificial Sequence
  Description of Artificial Sequence:  Enzymatic Nucleic Acid
gttcttgaggctagctacaacgaatttaagt

SEQ ID NO: 10531 - DNA, 31 bp, Artificial Sequence
  Description of Artificial Sequence:  Enzymatic Nucleic Acid
ttaggcagggctagctacaacgatcttgata

SEQ ID NO: 10532 - DNA, 31 bp, Artificial Sequence
  Description of Artificial Sequence:  Enzymatic Nucleic Acid
gaattaggggctagctacaacgaagttcttg

SEQ ID NO: 10533 - DNA, 31 bp, Artificial Sequence
  Description of Artificial Sequence:  Enzymatic Nucleic Acid
gtcctgaaggctagctacaacgataggcagt

SEQ ID NO: 10534 - DNA, 31 bp, Artificial Sequence
  Description of Artificial Sequence:  Enzymatic Nucleic Acid
tgtggaggggctagctacaacgacctgaatt

SEQ ID NO: 10535 - DNA, 31 bp, Artificial Sequence
  Description of Artificial Sequence:  Enzymatic Nucleic Acid
ctatcatgggctagctacaacgaggaggtcc

SEQ ID NO: 10536 - DNA, 31 bp, Artificial Sequence
  Description of Artificial Sequence:  Enzymatic Nucleic Acid
tcctatcaggctagctacaacgagtggaggt

SEQ ID NO: 10537 - DNA, 31 bp, Artificial Sequence
  Description of Artificial Sequence:  Enzymatic Nucleic Acid
acctcctaggctagctacaacgacatgtgga

SEQ ID NO: 10538 - DNA, 31 bp, Artificial Sequence
  Description of Artificial Sequence:  Enzymatic Nucleic Acid
aatgtaaaggctagctacaacgactcctatc

SEQ ID NO: 10539 - DNA, 31 bp, Artificial Sequence
  Description of Artificial Sequence:  Enzymatic Nucleic Acid
ttgaaatgggctagctacaacgaaaacctcc

SEQ ID NO: 10540 - DNA, 31 bp, Artificial Sequence
  Description of Artificial Sequence:  Enzymatic Nucleic Acid
acttgaaaggctagctacaacgagtaaacct

SEQ ID NO: 10541 - DNA, 31 bp, Artificial Sequence
  Description of Artificial Sequence:  Enzymatic Nucleic Acid
tattataaggctagctacaacgattgaaatg

SEQ ID NO: 10542 - DNA, 31 bp, Artificial Sequence
  Description of Artificial Sequence:  Enzymatic Nucleic Acid
atctattaggctagctacaacgaaacttgaa

SEQ ID NO: 10543 - DNA, 31 bp, Artificial Sequence
  Description of Artificial Sequence:  Enzymatic Nucleic Acid
tccatctaggctagctacaacgatataactt

SEQ ID NO: 10544 - DNA, 31 bp, Artificial Sequence
  Description of Artificial Sequence:  Enzymatic Nucleic Acid
ctcttccaggctagctacaacgactattata

SEQ ID NO: 10545 - DNA, 31 bp, Artificial Sequence
  Description of Artificial Sequence:  Enzymatic Nucleic Acid
tctggaaaggctagctacaacgatctcttcc

SEQ ID NO: 10546 - DNA, 31 bp, Artificial Sequence
  Description of Artificial Sequence:  Enzymatic Nucleic Acid
taccttcaggctagctacaacgacttctgga

SEQ ID NO: 10547 - DNA, 31 bp, Artificial Sequence
  Description of Artificial Sequence:  Enzymatic Nucleic Acid
ttgatctaggctagctacaacgacttcacct

SEQ ID NO: 10548 - DNA, 31 bp, Artificial Sequence
  Description of Artificial Sequence:  Enzymatic Nucleic Acid
ttctttgaggctagctacaacgactaccttc

SEQ ID NO: 10549 - DNA, 31 bp, Artificial Sequence
  Description of Artificial Sequence:  Enzymatic Nucleic Acid
attttttgggctagctacaacgattccttct

SEQ ID NO: 10550 - DNA, 31 bp, Artificial Sequence
  Description of Artificial Sequence:  Enzymatic Nucleic Acid
ctgcggcaggctagctacaacgatttttgct

SEQ ID NO: 10551 - DNA, 31 bp, Artificial Sequence
  Description of Artificial Sequence:  Enzymatic Nucleic Acid
ggctgcggggctagctacaacgaattttttg

SEQ ID NO: 10552 - DNA, 31 bp, Artificial Sequence
  Description of Artificial Sequence:  Enzymatic Nucleic Acid
tttggctgggctagctacaacgaggcatttt

SEQ ID NO: 10553 - DNA, 31 bp, Artificial Sequence
  Description of Artificial Sequence:  Enzymatic Nucleic Acid
taatttggggctagctacaacgatgcggcat

SEQ ID NO: 10554 - DNA, 31 bp, Artificial Sequence
  Description of Artificial Sequence:  Enzymatic Nucleic Acid
acagctaaggctagctacaacgattggctgc

SEQ ID NO: 10555 - DNA, 31 bp, Artificial Sequence
  Description of Artificial Sequence:  Enzymatic Nucleic Acid
ctcaacagggctagctacaacgataatttgg

SEQ ID NO: 10556 - DNA, 31 bp, Artificial Sequence
  Description of Artificial Sequence:  Enzymatic Nucleic Acid
tatctcaaggctagctacaacgaagctaatt

SEQ ID NO: 10557 - DNA, 31 bp, Artificial Sequence
  Description of Artificial Sequence:  Enzymatic Nucleic Acid
attaagtaggctagctacaacgactcaacag

SEQ ID NO: 10558 - DNA, 31 bp, Artificial Sequence
  Description of Artificial Sequence:  Enzymatic Nucleic Acid
ttattaagggctagctacaacgaatctcaac

SEQ ID NO: 10559 - DNA, 31 bp, Artificial Sequence
  Description of Artificial Sequence:  Enzymatic Nucleic Acid
tttccttaggctagctacaacgataagtatc

SEQ ID NO: 10560 - DNA, 31 bp, Artificial Sequence
  Description of Artificial Sequence:  Enzymatic Nucleic Acid
actaactgggctagctacaacgacttctttt

SEQ ID NO: 10561 - DNA, 31 bp, Artificial Sequence
  Description of Artificial Sequence:  Enzymatic Nucleic Acid
aggactaaggctagctacaacgatgccttct

SEQ ID NO: 10562 - DNA, 31 bp, Artificial Sequence
  Description of Artificial Sequence:  Enzymatic Nucleic Acid
ataaaggaggctagctacaacgataactgcc

SEQ ID NO: 10563 - DNA, 31 bp, Artificial Sequence
  Description of Artificial Sequence:  Enzymatic Nucleic Acid
gtcaataaggctagctacaacgaaaaggact

SEQ ID NO: 10564 - DNA, 31 bp, Artificial Sequence
  Description of Artificial Sequence:  Enzymatic Nucleic Acid
gttgtcaaggctagctacaacgaaataaagg

SEQ ID NO: 10565 - DNA, 31 bp, Artificial Sequence
  Description of Artificial Sequence:  Enzymatic Nucleic Acid
cgttgttgggctagctacaacgacaataata

SEQ ID NO: 10566 - DNA, 31 bp, Artificial Sequence
  Description of Artificial Sequence:  Enzymatic Nucleic Acid
attcgttgggctagctacaacgatgtcaata

SEQ ID NO: 10567 - DNA, 31 bp, Artificial Sequence
  Description of Artificial Sequence:  Enzymatic Nucleic Acid
agaattcgggctagctacaacgatgttgtca

SEQ ID NO: 10568 - DNA, 31 bp, Artificial Sequence
  Description of Artificial Sequence:  Enzymatic Nucleic Acid
ctgaagaaggctagctacaacgatcgttgtt

SEQ ID NO: 10569 - DNA, 31 bp, Artificial Sequence
  Description of Artificial Sequence:  Enzymatic Nucleic Acid
atggataaggctagctacaacgaccttctga

SEQ ID NO: 10570 - DNA, 31 bp, Artificial Sequence
  Description of Artificial Sequence:  Enzymatic Nucleic Acid
cccatggaggctagctacaacgaaatccttc

SEQ ID NO: 10571 - DNA, 31 bp, Artificial Sequence
  Description of Artificial Sequence:  Enzymatic Nucleic Acid
attccccaggctagctacaacgaggataatc

SEQ ID NO: 10572 - DNA, 31 bp, Artificial Sequence
  Description of Artificial Sequence:  Enzymatic Nucleic Acid
ctatgtaaggctagctacaacgatccccatg

SEQ ID NO: 10573 - DNA, 31 bp, Artificial Sequence
  Description of Artificial Sequence:  Enzymatic Nucleic Acid
ggcctatgggctagctacaacgaaattcccc

SEQ ID NO: 10574 - DNA, 31 bp, Artificial Sequence
  Description of Artificial Sequence:  Enzymatic Nucleic Acid
aaggcctaggctagctacaacgagtaattcc

SEQ ID NO: 10575 - DNA, 31 bp, Artificial Sequence
  Description of Artificial Sequence:  Enzymatic Nucleic Acid
tgataaggggctagctacaacgactatgtaa

SEQ ID NO: 10576 - DNA, 31 bp, Artificial Sequence
  Description of Artificial Sequence:  Enzymatic Nucleic Acid
tctattgaggctagctacaacgaaaggccta

SEQ ID NO: 10577 - DNA, 31 bp, Artificial Sequence
  Description of Artificial Sequence:  Enzymatic Nucleic Acid
caattctaggctagctacaacgatgataagg

SEQ ID NO: 10578 - DNA, 31 bp, Artificial Sequence
  Description of Artificial Sequence:  Enzymatic Nucleic Acid
ctgggcaaggctagctacaacgatctattga

SEQ ID NO: 10579 - DNA, 31 bp, Artificial Sequence
  Description of Artificial Sequence:  Enzymatic Nucleic Acid
cttctgggggctagctacaacgaaattctat

SEQ ID NO: 10580 - DNA, 31 bp, Artificial Sequence
  Description of Artificial Sequence:  Enzymatic Nucleic Acid
acagttagggctagctacaacgacttttctt

SEQ ID NO: 10581 - DNA, 31 bp, Artificial Sequence
  Description of Artificial Sequence:  Enzymatic Nucleic Acid
atttacagggctagctacaacgatagtcttt

SEQ ID NO: 10582 - DNA, 31 bp, Artificial Sequence
  Description of Artificial Sequence:  Enzymatic Nucleic Acid
ataatttaggctagctacaacgaagttagtc

SEQ ID NO: 10583 - DNA, 31 bp, Artificial Sequence
  Description of Artificial Sequence:  Enzymatic Nucleic Acid
gttcataaggctagctacaacgattacagtt

SEQ ID NO: 10584 - DNA, 31 bp, Artificial Sequence
  Description of Artificial Sequence:  Enzymatic Nucleic Acid
actgttcaggctagctacaacgaaatttaca

SEQ ID NO: 10585 - DNA, 31 bp, Artificial Sequence
  Description of Artificial Sequence:  Enzymatic Nucleic Acid
gcacactgggctagctacaacgatcataatt

SEQ ID NO: 10586 - DNA, 31 bp, Artificial Sequence
  Description of Artificial Sequence:  Enzymatic Nucleic Acid
gatgcacaggctagctacaacgatgttcata

SEQ ID NO: 10587 - DNA, 31 bp, Artificial Sequence
  Description of Artificial Sequence:  Enzymatic Nucleic Acid
ccgatgcaggctagctacaacgaactgttca

SEQ ID NO: 10588 - DNA, 31 bp, Artificial Sequence
  Description of Artificial Sequence:  Enzymatic Nucleic Acid
ccccgatgggctagctacaacgaacactgtt

SEQ ID NO: 10589 - DNA, 31 bp, Artificial Sequence
  Description of Artificial Sequence:  Enzymatic Nucleic Acid
acccccgaggctagctacaacgagcacactg

SEQ ID NO: 10590 - DNA, 31 bp, Artificial Sequence
  Description of Artificial Sequence:  Enzymatic Nucleic Acid
cccatgcaggctagctacaacgaccccgatg

SEQ ID NO: 10591 - DNA, 31 bp, Artificial Sequence
  Description of Artificial Sequence:  Enzymatic Nucleic Acid
ggcccatgggctagctacaacgaacccccga

SEQ ID NO: 10592 - DNA, 31 bp, Artificial Sequence
  Description of Artificial Sequence:  Enzymatic Nucleic Acid
ctggcccaggctagctacaacgagcaccccc

SEQ ID NO: 10593 - DNA, 31 bp, Artificial Sequence
  Description of Artificial Sequence:  Enzymatic Nucleic Acid
ccttctggggctagctacaacgaccatgcac

SEQ ID NO: 10594 - DNA, 31 bp, Artificial Sequence
  Description of Artificial Sequence:  Enzymatic Nucleic Acid
taatgaaaggctagctacaacgaccttctgg

SEQ ID NO: 10595 - DNA, 31 bp, Artificial Sequence
  Description of Artificial Sequence:  Enzymatic Nucleic Acid
atttataaggctagctacaacgagaaatcct

SEQ ID NO: 10596 - DNA, 31 bp, Artificial Sequence
  Description of Artificial Sequence:  Enzymatic Nucleic Acid
tgcatttaggctagctacaacgaaatgaaat

SEQ ID NO: 10597 - DNA, 31 bp, Artificial Sequence
  Description of Artificial Sequence:  Enzymatic Nucleic Acid
attttgcaggctagctacaacgattataatg

SEQ ID NO: 10598 - DNA, 31 bp, Artificial Sequence
  Description of Artificial Sequence:  Enzymatic Nucleic Acid
ccattttgggctagctacaacgaatttataa

SEQ ID NO: 10599 - DNA, 31 bp, Artificial Sequence
  Description of Artificial Sequence:  Enzymatic Nucleic Acid
ctgtcccaggctagctacaacgatttgcatt

SEQ ID NO: 10600 - DNA, 31 bp, Artificial Sequence
  Description of Artificial Sequence:  Enzymatic Nucleic Acid
tctttctgggctagctacaacgacccatttt

SEQ ID NO: 10601 - DNA, 31 bp, Artificial Sequence
  Description of Artificial Sequence:  Enzymatic Nucleic Acid
atactataggctagctacaacgatctttctg

SEQ ID NO: 10602 - DNA, 31 bp, Artificial Sequence
  Description of Artificial Sequence:  Enzymatic Nucleic Acid
caatactaggctagctacaacgaattctttc

SEQ ID NO: 10603 - DNA, 31 bp, Artificial Sequence
  Description of Artificial Sequence:  Enzymatic Nucleic Acid
taccaataggctagctacaacgatatattct

SEQ ID NO: 10604 - DNA, 31 bp, Artificial Sequence
  Description of Artificial Sequence:  Enzymatic Nucleic Acid
tgtaccaaggctagctacaacgaactatatt

SEQ ID NO: 10605 - DNA, 31 bp, Artificial Sequence
  Description of Artificial Sequence:  Enzymatic Nucleic Acid
aacctgtaggctagctacaacgacaatacta

SEQ ID NO: 10606 - DNA, 31 bp, Artificial Sequence
  Description of Artificial Sequence:  Enzymatic Nucleic Acid
agaacctgggctagctacaacgaaccaatac

SEQ ID NO: 10607 - DNA, 31 bp, Artificial Sequence
  Description of Artificial Sequence:  Enzymatic Nucleic Acid
tagtagaaggctagctacaacgactgtacca

SEQ ID NO: 10608 - DNA, 31 bp, Artificial Sequence
  Description of Artificial Sequence:  Enzymatic Nucleic Acid
ctgtttagggctagctacaacgaagaacctg

SEQ ID NO: 10609 - DNA, 31 bp, Artificial Sequence
  Description of Artificial Sequence:  Enzymatic Nucleic Acid
gcttcctgggctagctacaacgattagtaga

SEQ ID NO: 10610 - DNA, 31 bp, Artificial Sequence
  Description of Artificial Sequence:  Enzymatic Nucleic Acid
ttgttttgggctagctacaacgattcctgtt

SEQ ID NO: 10611 - DNA, 31 bp, Artificial Sequence
  Description of Artificial Sequence:  Enzymatic Nucleic Acid
gccaattgggctagctacaacgatttgcttc

SEQ ID NO: 10612 - DNA, 31 bp, Artificial Sequence
  Description of Artificial Sequence:  Enzymatic Nucleic Acid
gcggccaaggctagctacaacgatgttttgc

SEQ ID NO: 10613 - DNA, 31 bp, Artificial Sequence
  Description of Artificial Sequence:  Enzymatic Nucleic Acid
tttagcggggctagctacaacgacaattgtt

SEQ ID NO: 10614 - DNA, 31 bp, Artificial Sequence
  Description of Artificial Sequence:  Enzymatic Nucleic Acid
aagtttagggctagctacaacgaggccaatt

SEQ ID NO: 10615 - DNA, 31 bp, Artificial Sequence
  Description of Artificial Sequence:  Enzymatic Nucleic Acid
tatgcaagggctagctacaacgattagcggc

SEQ ID NO: 10616 - DNA, 31 bp, Artificial Sequence
  Description of Artificial Sequence:  Enzymatic Nucleic Acid
aagatatgggctagctacaacgaaagtttag

SEQ ID NO: 10617 - DNA, 31 bp, Artificial Sequence
  Description of Artificial Sequence:  Enzymatic Nucleic Acid
tgaagataggctagctacaacgagcaagttt

SEQ ID NO: 10618 - DNA, 31 bp, Artificial Sequence
  Description of Artificial Sequence:  Enzymatic Nucleic Acid
tctgaagaggctagctacaacgaatgcaagt

SEQ ID NO: 10619 - DNA, 31 bp, Artificial Sequence
  Description of Artificial Sequence:  Enzymatic Nucleic Acid
tgataataggctagctacaacgactgaagat

SEQ ID NO: 10620 - DNA, 31 bp, Artificial Sequence
  Description of Artificial Sequence:  Enzymatic Nucleic Acid
tctgataaggctagctacaacgaatctgaag

SEQ ID NO: 10621 - DNA, 31 bp, Artificial Sequence
  Description of Artificial Sequence:  Enzymatic Nucleic Acid
tcttctgaggctagctacaacgaaatatctg

SEQ ID NO: 10622 - DNA, 31 bp, Artificial Sequence
  Description of Artificial Sequence:  Enzymatic Nucleic Acid
cactgaggggctagctacaacgattcttctg

SEQ ID NO: 10623 - DNA, 31 bp, Artificial Sequence
  Description of Artificial Sequence:  Enzymatic Nucleic Acid
agatttcaggctagctacaacgatgaggttt

SEQ ID NO: 10624 - DNA, 31 bp, Artificial Sequence
  Description of Artificial Sequence:  Enzymatic Nucleic Acid
tagtcagaggctagctacaacgattcactga

SEQ ID NO: 10625 - DNA, 31 bp, Artificial Sequence
  Description of Artificial Sequence:  Enzymatic Nucleic Acid
acaggtagggctagctacaacgacagatttc

SEQ ID NO: 10626 - DNA, 31 bp, Artificial Sequence
  Description of Artificial Sequence:  Enzymatic Nucleic Acid
aggacaggggctagctacaacgaagtcagat

SEQ ID NO: 10627 - DNA, 31 bp, Artificial Sequence
  Description of Artificial Sequence:  Enzymatic Nucleic Acid
ccagaggaggctagctacaacgaaggtagtc

SEQ ID NO: 10628 - DNA, 31 bp, Artificial Sequence
  Description of Artificial Sequence:  Enzymatic Nucleic Acid
caaaagaaggctagctacaacgacagaggac

SEQ ID NO: 10629 - DNA, 31 bp, Artificial Sequence
  Description of Artificial Sequence:  Enzymatic Nucleic Acid
cgtagtagggctagctacaacgaaaaagaac

SEQ ID NO: 10630 - DNA, 31 bp, Artificial Sequence
  Description of Artificial Sequence:  Enzymatic Nucleic Acid
acacgtagggctagctacaacgaagcaaaag

SEQ ID NO: 10631 - DNA, 31 bp, Artificial Sequence
  Description of Artificial Sequence:  Enzymatic Nucleic Acid
ctcacacgggctagctacaacgaagtagcaa

SEQ ID NO: 10632 - DNA, 31 bp, Artificial Sequence
  Description of Artificial Sequence:  Enzymatic Nucleic Acid
gactcacaggctagctacaacgagtagtagc

SEQ ID NO: 10633 - DNA, 31 bp, Artificial Sequence
  Description of Artificial Sequence:  Enzymatic Nucleic Acid
gggactcaggctagctacaacgaacgtagta

SEQ ID NO: 10634 - DNA, 31 bp, Artificial Sequence
  Description of Artificial Sequence:  Enzymatic Nucleic Acid
ctttgggaggctagctacaacgatcacacgt

SEQ ID NO: 10635 - DNA, 31 bp, Artificial Sequence
  Description of Artificial Sequence:  Enzymatic Nucleic Acid
aagagttgggctagctacaacgatttgggac

SEQ ID NO: 10636 - DNA, 31 bp, Artificial Sequence
  Description of Artificial Sequence:  Enzymatic Nucleic Acid
ctaaagagggctagctacaacgatgctttgg

SEQ ID NO: 10637 - DNA, 31 bp, Artificial Sequence
  Description of Artificial Sequence:  Enzymatic Nucleic Acid
gctggtcaggctagctacaacgataaagagt

SEQ ID NO: 10638 - DNA, 31 bp, Artificial Sequence
  Description of Artificial Sequence:  Enzymatic Nucleic Acid
tgtgctggggctagctacaacgacactaaag

SEQ ID NO: 10639 - DNA, 31 bp, Artificial Sequence
  Description of Artificial Sequence:  Enzymatic Nucleic Acid
cgagtgtgggctagctacaacgatggtcact

SEQ ID NO: 10640 - DNA, 31 bp, Artificial Sequence
  Description of Artificial Sequence:  Enzymatic Nucleic Acid
agcgagtgggctagctacaacgagctggtca

SEQ ID NO: 10641 - DNA, 31 bp, Artificial Sequence
  Description of Artificial Sequence:  Enzymatic Nucleic Acid
gaagcgagggctagctacaacgagtgctggt

SEQ ID NO: 10642 - DNA, 31 bp, Artificial Sequence
  Description of Artificial Sequence:  Enzymatic Nucleic Acid
ttcagaagggctagctacaacgagagtgtgc

SEQ ID NO: 10643 - DNA, 31 bp, Artificial Sequence
  Description of Artificial Sequence:  Enzymatic Nucleic Acid
gatgatgaggctagctacaacgatcagaagc

SEQ ID NO: 10644 - DNA, 31 bp, Artificial Sequence
  Description of Artificial Sequence:  Enzymatic Nucleic Acid
tcagatgaggctagctacaacgagattcaga

SEQ ID NO: 10645 - DNA, 31 bp, Artificial Sequence
  Description of Artificial Sequence:  Enzymatic Nucleic Acid
ccttcagaggctagctacaacgagatgattc

SEQ ID NO: 10646 - DNA, 31 bp, Artificial Sequence
  Description of Artificial Sequence:  Enzymatic Nucleic Acid
agaagtcaggctagctacaacgacttcagat

SEQ ID NO: 10647 - DNA, 31 bp, Artificial Sequence
  Description of Artificial Sequence:  Enzymatic Nucleic Acid
ctgagaagggctagctacaacgacaccttca

SEQ ID NO: 10648 - DNA, 31 bp, Artificial Sequence
  Description of Artificial Sequence:  Enzymatic Nucleic Acid
tgtatctgggctagctacaacgatgagaagt

SEQ ID NO: 10649 - DNA, 31 bp, Artificial Sequence
  Description of Artificial Sequence:  Enzymatic Nucleic Acid
ctgatgtaggctagctacaacgactgctgag

SEQ ID NO: 10650 - DNA, 31 bp, Artificial Sequence
  Description of Artificial Sequence:  Enzymatic Nucleic Acid
ctctgatgggctagctacaacgaatctgctg

SEQ ID NO: 10651 - DNA, 31 bp, Artificial Sequence
  Description of Artificial Sequence:  Enzymatic Nucleic Acid
atctctgaggctagctacaacgagtatctgc

SEQ ID NO: 10652 - DNA, 31 bp, Artificial Sequence
  Description of Artificial Sequence:  Enzymatic Nucleic Acid
agaatttaggctagctacaacgactctgatg

SEQ ID NO: 10653 - DNA, 31 bp, Artificial Sequence
  Description of Artificial Sequence:  Enzymatic Nucleic Acid
tgttagaaggctagctacaacgattatctct

SEQ ID NO: 10654 - DNA, 31 bp, Artificial Sequence
  Description of Artificial Sequence:  Enzymatic Nucleic Acid
tgtcactgggctagctacaacgatagaattt

SEQ ID NO: 10655 - DNA, 31 bp, Artificial Sequence
  Description of Artificial Sequence:  Enzymatic Nucleic Acid
aactgtcaggctagctacaacgatgttagaa

SEQ ID NO: 10656 - DNA, 31 bp, Artificial Sequence
  Description of Artificial Sequence:  Enzymatic Nucleic Acid
ttaaactgggctagctacaacgacactgtta

SEQ ID NO: 10657 - DNA, 31 bp, Artificial Sequence
  Description of Artificial Sequence:  Enzymatic Nucleic Acid
tgtttaaaggctagctacaacgatgtcactg

SEQ ID NO: 10658 - DNA, 31 bp, Artificial Sequence
  Description of Artificial Sequence:  Enzymatic Nucleic Acid
aagaactgggctagctacaacgattaaactg

SEQ ID NO: 10659 - DNA, 31 bp, Artificial Sequence
  Description of Artificial Sequence:  Enzymatic Nucleic Acid
acgaagaaggctagctacaacgatgtttaaa

SEQ ID NO: 10660 - DNA, 31 bp, Artificial Sequence
  Description of Artificial Sequence:  Enzymatic Nucleic Acid
ataagcaaggctagctacaacgagaagaact

SEQ ID NO: 10661 - DNA, 31 bp, Artificial Sequence
  Description of Artificial Sequence:  Enzymatic Nucleic Acid
ttcataagggctagctacaacgaaacgaaga

SEQ ID NO: 10662 - DNA, 31 bp, Artificial Sequence
  Description of Artificial Sequence:  Enzymatic Nucleic Acid
accattcaggctagctacaacgaaagcaacg

SEQ ID NO: 10663 - DNA, 31 bp, Artificial Sequence
  Description of Artificial Sequence:  Enzymatic Nucleic Acid
tgagaccaggctagctacaacgatcataagc

SEQ ID NO: 10664 - DNA, 31 bp, Artificial Sequence
  Description of Artificial Sequence:  Enzymatic Nucleic Acid
ttctgagaggctagctacaacgacattcata

SEQ ID NO: 10665 - DNA, 31 bp, Artificial Sequence
  Description of Artificial Sequence:  Enzymatic Nucleic Acid
tttgattaggctagctacaacgattctgaga

SEQ ID NO: 10666 - DNA, 31 bp, Artificial Sequence
  Description of Artificial Sequence:  Enzymatic Nucleic Acid
tcctttgaggctagctacaacgatatttctg

SEQ ID NO: 10667 - DNA, 31 bp, Artificial Sequence
  Description of Artificial Sequence:  Enzymatic Nucleic Acid
tctttttgggctagctacaacgacttccttt

SEQ ID NO: 10668 - DNA, 31 bp, Artificial Sequence
  Description of Artificial Sequence:  Enzymatic Nucleic Acid
gccaaagaggctagctacaacgactttttgc

SEQ ID NO: 10669 - DNA, 31 bp, Artificial Sequence
  Description of Artificial Sequence:  Enzymatic Nucleic Acid
tctgggtgggctagctacaacgacaaagatc

SEQ ID NO: 10670 - DNA, 31 bp, Artificial Sequence
  Description of Artificial Sequence:  Enzymatic Nucleic Acid
aatctgggggctagctacaacgagccaaaga

SEQ ID NO: 10671 - DNA, 31 bp, Artificial Sequence
  Description of Artificial Sequence:  Enzymatic Nucleic Acid
aggtcaaaggctagctacaacgactgggtgc

SEQ ID NO: 10672 - DNA, 31 bp, Artificial Sequence
  Description of Artificial Sequence:  Enzymatic Nucleic Acid
caggaaggggctagctacaacgacaaatctg

SEQ ID NO: 10673 - DNA, 31 bp, Artificial Sequence
  Description of Artificial Sequence:  Enzymatic Nucleic Acid
ctttcatgggctagctacaacgacaggaagg

SEQ ID NO: 10674 - DNA, 31 bp, Artificial Sequence
  Description of Artificial Sequence:  Enzymatic Nucleic Acid
ttctttcaggctagctacaacgagtcaggaa

SEQ ID NO: 10675 - DNA, 31 bp, Artificial Sequence
  Description of Artificial Sequence:  Enzymatic Nucleic Acid
atactttgggctagctacaacgattctttca

SEQ ID NO: 10676 - DNA, 31 bp, Artificial Sequence
  Description of Artificial Sequence:  Enzymatic Nucleic Acid
acagtataggctagctacaacgatttgtttc

SEQ ID NO: 10677 - DNA, 31 bp, Artificial Sequence
  Description of Artificial Sequence:  Enzymatic Nucleic Acid
ccacagtaggctagctacaacgaactttgtt

SEQ ID NO: 10678 - DNA, 31 bp, Artificial Sequence
  Description of Artificial Sequence:  Enzymatic Nucleic Acid
gtccacagggctagctacaacgaatactttg

SEQ ID NO: 10679 - DNA, 31 bp, Artificial Sequence
  Description of Artificial Sequence:  Enzymatic Nucleic Acid
cttgtccaggctagctacaacgaagtatact

SEQ ID NO: 10680 - DNA, 31 bp, Artificial Sequence
  Description of Artificial Sequence:  Enzymatic Nucleic Acid
acctcttgggctagctacaacgaccacagta

SEQ ID NO: 10681 - DNA, 31 bp, Artificial Sequence
  Description of Artificial Sequence:  Enzymatic Nucleic Acid
atgccaaaggctagctacaacgactcttgtc

SEQ ID NO: 10682 - DNA, 31 bp, Artificial Sequence
  Description of Artificial Sequence:  Enzymatic Nucleic Acid
aatccatgggctagctacaacgacaaacctc

SEQ ID NO: 10683 - DNA, 31 bp, Artificial Sequence
  Description of Artificial Sequence:  Enzymatic Nucleic Acid
aaaatccaggctagctacaacgagccaaacc

SEQ ID NO: 10684 - DNA, 31 bp, Artificial Sequence
  Description of Artificial Sequence:  Enzymatic Nucleic Acid
ctttaaaaggctagctacaacgaccatgcca

SEQ ID NO: 10685 - DNA, 31 bp, Artificial Sequence
  Description of Artificial Sequence:  Enzymatic Nucleic Acid
taattctaggctagctacaacgattctttaa

SEQ ID NO: 10686 - DNA, 31 bp, Artificial Sequence
  Description of Artificial Sequence:  Enzymatic Nucleic Acid
ccaattaaggctagctacaacgatctatttc

SEQ ID NO: 10687 - DNA, 31 bp, Artificial Sequence
  Description of Artificial Sequence:  Enzymatic Nucleic Acid
tgagccaaggctagctacaacgataattcta

SEQ ID NO: 10688 - DNA, 31 bp, Artificial Sequence
  Description of Artificial Sequence:  Enzymatic Nucleic Acid
cacctgagggctagctacaacgacaattaat

SEQ ID NO: 10689 - DNA, 31 bp, Artificial Sequence
  Description of Artificial Sequence:  Enzymatic Nucleic Acid
caaatccaggctagctacaacgactgagcca

SEQ ID NO: 10690 - DNA, 31 bp, Artificial Sequence
  Description of Artificial Sequence:  Enzymatic Nucleic Acid
tggccaaaggctagctacaacgaccacctga

SEQ ID NO: 10691 - DNA, 31 bp, Artificial Sequence
  Description of Artificial Sequence:  Enzymatic Nucleic Acid
aaacttggggctagctacaacgacaaatcca

SEQ ID NO: 10692 - DNA, 31 bp, Artificial Sequence
  Description of Artificial Sequence:  Enzymatic Nucleic Acid
tttgaaaaggctagctacaacgattggccaa

SEQ ID NO: 10693 - DNA, 31 bp, Artificial Sequence
  Description of Artificial Sequence:  Enzymatic Nucleic Acid
gtgttttgggctagctacaacgatttgaaaa

SEQ ID NO: 10694 - DNA, 31 bp, Artificial Sequence
  Description of Artificial Sequence:  Enzymatic Nucleic Acid
attctgtgggctagctacaacgatttgcttt

SEQ ID NO: 10695 - DNA, 31 bp, Artificial Sequence
  Description of Artificial Sequence:  Enzymatic Nucleic Acid
caattctgggctagctacaacgagttttgct

SEQ ID NO: 10696 - DNA, 31 bp, Artificial Sequence
  Description of Artificial Sequence:  Enzymatic Nucleic Acid
tccgtcaaggctagctacaacgatctgtgtt

SEQ ID NO: 10697 - DNA, 31 bp, Artificial Sequence
  Description of Artificial Sequence:  Enzymatic Nucleic Acid
tctttccgggctagctacaacgacaattctg

SEQ ID NO: 10698 - DNA, 31 bp, Artificial Sequence
  Description of Artificial Sequence:  Enzymatic Nucleic Acid
aacgtaagggctagctacaacgactttccgt

SEQ ID NO: 10699 - DNA, 31 bp, Artificial Sequence
  Description of Artificial Sequence:  Enzymatic Nucleic Acid
taataacgggctagctacaacgaaagtcttt

SEQ ID NO: 10700 - DNA, 31 bp, Artificial Sequence
  Description of Artificial Sequence:  Enzymatic Nucleic Acid
tttaataaggctagctacaacgagtaagtct

SEQ ID NO: 10701 - DNA, 31 bp, Artificial Sequence
  Description of Artificial Sequence:  Enzymatic Nucleic Acid
acgtttaaggctagctacaacgaaacgtaag

SEQ ID NO: 10702 - DNA, 31 bp, Artificial Sequence
  Description of Artificial Sequence:  Enzymatic Nucleic Acid
ttaacacgggctagctacaacgattaataac

SEQ ID NO: 10703 - DNA, 31 bp, Artificial Sequence
  Description of Artificial Sequence:  Enzymatic Nucleic Acid
atttaacaggctagctacaacgagtttaata

SEQ ID NO: 10704 - DNA, 31 bp, Artificial Sequence
  Description of Artificial Sequence:  Enzymatic Nucleic Acid
atatttaaggctagctacaacgaacgtttaa

SEQ ID NO: 10705 - DNA, 31 bp, Artificial Sequence
  Description of Artificial Sequence:  Enzymatic Nucleic Acid
ttattataggctagctacaacgattaacacg

SEQ ID NO: 10706 - DNA, 31 bp, Artificial Sequence
  Description of Artificial Sequence:  Enzymatic Nucleic Acid
cgttattaggctagctacaacgaatttaaca

SEQ ID NO: 10707 - DNA, 31 bp, Artificial Sequence
  Description of Artificial Sequence:  Enzymatic Nucleic Acid
tctcgttaggctagctacaacgatatattta

SEQ ID NO: 10708 - DNA, 31 bp, Artificial Sequence
  Description of Artificial Sequence:  Enzymatic Nucleic Acid
ccttctcgggctagctacaacgatattatat

SEQ ID NO: 10709 - DNA, 31 bp, Artificial Sequence
  Description of Artificial Sequence:  Enzymatic Nucleic Acid
acgctccgggctagctacaacgacttctcgt

SEQ ID NO: 10710 - DNA, 31 bp, Artificial Sequence
  Description of Artificial Sequence:  Enzymatic Nucleic Acid
acttcacgggctagctacaacgatccgcctt

SEQ ID NO: 10711 - DNA, 31 bp, Artificial Sequence
  Description of Artificial Sequence:  Enzymatic Nucleic Acid
ttacttcaggctagctacaacgagctccgcc

SEQ ID NO: 10712 - DNA, 31 bp, Artificial Sequence
  Description of Artificial Sequence:  Enzymatic Nucleic Acid
tgcttttaggctagctacaacgattcacgct

SEQ ID NO: 10713 - DNA, 31 bp, Artificial Sequence
  Description of Artificial Sequence:  Enzymatic Nucleic Acid
tgccaatgggctagctacaacgattttactt

SEQ ID NO: 10714 - DNA, 31 bp, Artificial Sequence
  Description of Artificial Sequence:  Enzymatic Nucleic Acid
tttgccaaggctagctacaacgagcttttac

SEQ ID NO: 10715 - DNA, 31 bp, Artificial Sequence
  Description of Artificial Sequence:  Enzymatic Nucleic Acid
aagttttgggctagctacaacgacaatgctt

SEQ ID NO: 10716 - DNA, 31 bp, Artificial Sequence
  Description of Artificial Sequence:  Enzymatic Nucleic Acid
tgatcaagggctagctacaacgatttgccaa

SEQ ID NO: 10717 - DNA, 31 bp, Artificial Sequence
  Description of Artificial Sequence:  Enzymatic Nucleic Acid
ttacatgaggctagctacaacgacaagtttt

SEQ ID NO: 10718 - DNA, 31 bp, Artificial Sequence
  Description of Artificial Sequence:  Enzymatic Nucleic Acid
tatttacaggctagctacaacgagatcaagt

SEQ ID NO: 10719 - DNA, 31 bp, Artificial Sequence
  Description of Artificial Sequence:  Enzymatic Nucleic Acid
aatatttaggctagctacaacgaatgatcaa

SEQ ID NO: 10720 - DNA, 31 bp, Artificial Sequence
  Description of Artificial Sequence:  Enzymatic Nucleic Acid
gaacaataggctagctacaacgattacatga

SEQ ID NO: 10721 - DNA, 31 bp, Artificial Sequence
  Description of Artificial Sequence:  Enzymatic Nucleic Acid
gtgaacaaggctagctacaacgaatttacat

SEQ ID NO: 10722 - DNA, 31 bp, Artificial Sequence
  Description of Artificial Sequence:  Enzymatic Nucleic Acid
gtagtgaaggctagctacaacgaaatattta

SEQ ID NO: 10723 - DNA, 31 bp, Artificial Sequence
  Description of Artificial Sequence:  Enzymatic Nucleic Acid
cattgtagggctagctacaacgagaacaata

SEQ ID NO: 10724 - DNA, 31 bp, Artificial Sequence
  Description of Artificial Sequence:  Enzymatic Nucleic Acid
agccattgggctagctacaacgaagtgaaca

SEQ ID NO: 10725 - DNA, 31 bp, Artificial Sequence
  Description of Artificial Sequence:  Enzymatic Nucleic Acid
aacagccaggctagctacaacgatgtagtga

SEQ ID NO: 10726 - DNA, 31 bp, Artificial Sequence
  Description of Artificial Sequence:  Enzymatic Nucleic Acid
cccaacagggctagctacaacgacattgtag

SEQ ID NO: 10727 - DNA, 31 bp, Artificial Sequence
  Description of Artificial Sequence:  Enzymatic Nucleic Acid
catcccaaggctagctacaacgaagccattg

SEQ ID NO: 10728 - DNA, 31 bp, Artificial Sequence
  Description of Artificial Sequence:  Enzymatic Nucleic Acid
caaatccaggctagctacaacgacccaacag

SEQ ID NO: 10729 - DNA, 31 bp, Artificial Sequence
  Description of Artificial Sequence:  Enzymatic Nucleic Acid
taatcaaaggctagctacaacgaccatccca

SEQ ID NO: 10730 - DNA, 31 bp, Artificial Sequence
  Description of Artificial Sequence:  Enzymatic Nucleic Acid
gatcataaggctagctacaacgacaaatcca

SEQ ID NO: 10731 - DNA, 31 bp, Artificial Sequence
  Description of Artificial Sequence:  Enzymatic Nucleic Acid
caggatcaggctagctacaacgaaatcaaat

SEQ ID NO: 10732 - DNA, 31 bp, Artificial Sequence
  Description of Artificial Sequence:  Enzymatic Nucleic Acid
tctcaggaggctagctacaacgacataatca

SEQ ID NO: 10733 - DNA, 31 bp, Artificial Sequence
  Description of Artificial Sequence:  Enzymatic Nucleic Acid
atcactggggctagctacaacgactcaggat

SEQ ID NO: 10734 - DNA, 31 bp, Artificial Sequence
  Description of Artificial Sequence:  Enzymatic Nucleic Acid
aatcatcaggctagctacaacgatggtctca

SEQ ID NO: 10735 - DNA, 31 bp, Artificial Sequence
  Description of Artificial Sequence:  Enzymatic Nucleic Acid
gagaatcaggctagctacaacgacactggtc

SEQ ID NO: 10736 - DNA, 31 bp, Artificial Sequence
  Description of Artificial Sequence:  Enzymatic Nucleic Acid
caagagaaggctagctacaacgacatcactg

SEQ ID NO: 10737 - DNA, 31 bp, Artificial Sequence
  Description of Artificial Sequence:  Enzymatic Nucleic Acid
aatcactgggctagctacaacgatctcaaga

SEQ ID NO: 10738 - DNA, 31 bp, Artificial Sequence
  Description of Artificial Sequence:  Enzymatic Nucleic Acid
cataatcaggctagctacaacgatgctctca

SEQ ID NO: 10739 - DNA, 31 bp, Artificial Sequence
  Description of Artificial Sequence:  Enzymatic Nucleic Acid
gatcataaggctagctacaacgacactgctc

SEQ ID NO: 10740 - DNA, 31 bp, Artificial Sequence
  Description of Artificial Sequence:  Enzymatic Nucleic Acid
caggatcaggctagctacaacgaaatcactg

SEQ ID NO: 10741 - DNA, 31 bp, Artificial Sequence
  Description of Artificial Sequence:  Enzymatic Nucleic Acid
ttttgctgggctagctacaacgatctcagga

SEQ ID NO: 10742 - DNA, 31 bp, Artificial Sequence
  Description of Artificial Sequence:  Enzymatic Nucleic Acid
tatttttgggctagctacaacgatgttctca

SEQ ID NO: 10743 - DNA, 31 bp, Artificial Sequence
  Description of Artificial Sequence:  Enzymatic Nucleic Acid
ttgaactaggctagctacaacgattttgctg

SEQ ID NO: 10744 - DNA, 31 bp, Artificial Sequence
  Description of Artificial Sequence:  Enzymatic Nucleic Acid
accttgaaggctagctacaacgatatttttg

SEQ ID NO: 10745 - DNA, 31 bp, Artificial Sequence
  Description of Artificial Sequence:  Enzymatic Nucleic Acid
gtctttgaggctagctacaacgacttgaact

SEQ ID NO: 10746 - DNA, 31 bp, Artificial Sequence
  Description of Artificial Sequence:  Enzymatic Nucleic Acid
gcacttagggctagctacaacgactttgacc

SEQ ID NO: 10747 - DNA, 31 bp, Artificial Sequence
  Description of Artificial Sequence:  Enzymatic Nucleic Acid
aaaaggcaggctagctacaacgattagtctt

SEQ ID NO: 10748 - DNA, 31 bp, Artificial Sequence
  Description of Artificial Sequence:  Enzymatic Nucleic Acid
tgaaaaggggctagctacaacgaacttagtc

SEQ ID NO: 10749 - DNA, 31 bp, Artificial Sequence
  Description of Artificial Sequence:  Enzymatic Nucleic Acid
catttggaggctagctacaacgagaaaaggc

SEQ ID NO: 10750 - DNA, 31 bp, Artificial Sequence
  Description of Artificial Sequence:  Enzymatic Nucleic Acid
gaattccaggctagctacaacgattggatga

SEQ ID NO: 10751 - DNA, 31 bp, Artificial Sequence
  Description of Artificial Sequence:  Enzymatic Nucleic Acid
tcacagaaggctagctacaacgatccatttg

SEQ ID NO: 10752 - DNA, 31 bp, Artificial Sequence
  Description of Artificial Sequence:  Enzymatic Nucleic Acid
ctttatcaggctagctacaacgaagaattcc

SEQ ID NO: 10753 - DNA, 31 bp, Artificial Sequence
  Description of Artificial Sequence:  Enzymatic Nucleic Acid
tccctttaggctagctacaacgacacagaat

SEQ ID NO: 10754 - DNA, 31 bp, Artificial Sequence
  Description of Artificial Sequence:  Enzymatic Nucleic Acid
ttccaaggggctagctacaacgaccctttat

SEQ ID NO: 10755 - DNA, 31 bp, Artificial Sequence
  Description of Artificial Sequence:  Enzymatic Nucleic Acid
atccattgggctagctacaacgatccaaggt

SEQ ID NO: 10756 - DNA, 31 bp, Artificial Sequence
  Description of Artificial Sequence:  Enzymatic Nucleic Acid
tcaatccaggctagctacaacgatgttccaa

SEQ ID NO: 10757 - DNA, 31 bp, Artificial Sequence
  Description of Artificial Sequence:  Enzymatic Nucleic Acid
tttttcaaggctagctacaacgaccattgtt

SEQ ID NO: 10758 - DNA, 31 bp, Artificial Sequence
  Description of Artificial Sequence:  Enzymatic Nucleic Acid
gtttctcgggctagctacaacgactcttctt

SEQ ID NO: 10759 - DNA, 31 bp, Artificial Sequence
  Description of Artificial Sequence:  Enzymatic Nucleic Acid
ttgtctagggctagctacaacgattctcgcc

SEQ ID NO: 10760 - DNA, 31 bp, Artificial Sequence
  Description of Artificial Sequence:  Enzymatic Nucleic Acid
aaactttgggctagctacaacgactagtttc

SEQ ID NO: 10761 - DNA, 31 bp, Artificial Sequence
  Description of Artificial Sequence:  Enzymatic Nucleic Acid
agccaaaaggctagctacaacgatttgtcta

SEQ ID NO: 10762 - DNA, 31 bp, Artificial Sequence
  Description of Artificial Sequence:  Enzymatic Nucleic Acid
ttccaaagggctagctacaacgacaaaactt

SEQ ID NO: 10763 - DNA, 31 bp, Artificial Sequence
  Description of Artificial Sequence:  Enzymatic Nucleic Acid
tcaaagagggctagctacaacgatccaaagc

SEQ ID NO: 10764 - DNA, 31 bp, Artificial Sequence
  Description of Artificial Sequence:  Enzymatic Nucleic Acid
gttatttgggctagctacaacgatcaaagag

SEQ ID NO: 10765 - DNA, 31 bp, Artificial Sequence
  Description of Artificial Sequence:  Enzymatic Nucleic Acid
ttttgttaggctagctacaacgattgttcaa

SEQ ID NO: 10766 - DNA, 31 bp, Artificial Sequence
  Description of Artificial Sequence:  Enzymatic Nucleic Acid
cccttttgggctagctacaacgatatttgtt

SEQ ID NO: 10767 - DNA, 31 bp, Artificial Sequence
  Description of Artificial Sequence:  Enzymatic Nucleic Acid
ataatccaggctagctacaacgacccttttg

SEQ ID NO: 10768 - DNA, 31 bp, Artificial Sequence
  Description of Artificial Sequence:  Enzymatic Nucleic Acid
gtatataaggctagctacaacgaccacccct

SEQ ID NO: 10769 - DNA, 31 bp, Artificial Sequence
  Description of Artificial Sequence:  Enzymatic Nucleic Acid
aatgtataggctagctacaacgaaatccacc

SEQ ID NO: 10770 - DNA, 31 bp, Artificial Sequence
  Description of Artificial Sequence:  Enzymatic Nucleic Acid
tgaatgtaggctagctacaacgaataatcca

SEQ ID NO: 10771 - DNA, 31 bp, Artificial Sequence
  Description of Artificial Sequence:  Enzymatic Nucleic Acid
tttgaatgggctagctacaacgaatataatc

SEQ ID NO: 10772 - DNA, 31 bp, Artificial Sequence
  Description of Artificial Sequence:  Enzymatic Nucleic Acid
tttttgaaggctagctacaacgagtatataa

SEQ ID NO: 10773 - DNA, 31 bp, Artificial Sequence
  Description of Artificial Sequence:  Enzymatic Nucleic Acid
tgaattaaggctagctacaacgattttttga

SEQ ID NO: 10774 - DNA, 31 bp, Artificial Sequence
  Description of Artificial Sequence:  Enzymatic Nucleic Acid
tctatgaaggctagctacaacgataattttt

SEQ ID NO: 10775 - DNA, 31 bp, Artificial Sequence
  Description of Artificial Sequence:  Enzymatic Nucleic Acid
gatctctaggctagctacaacgagaattaat

SEQ ID NO: 10776 - DNA, 31 bp, Artificial Sequence
  Description of Artificial Sequence:  Enzymatic Nucleic Acid
gcttaagaggctagctacaacgactctatga

SEQ ID NO: 10777 - DNA, 31 bp, Artificial Sequence
  Description of Artificial Sequence:  Enzymatic Nucleic Acid
ttacttggggctagctacaacgattaagatc

SEQ ID NO: 10778 - DNA, 31 bp, Artificial Sequence
  Description of Artificial Sequence:  Enzymatic Nucleic Acid
atatattaggctagctacaacgattggctta

SEQ ID NO: 10779 - DNA, 31 bp, Artificial Sequence
  Description of Artificial Sequence:  Enzymatic Nucleic Acid
agaatataggctagctacaacgatacttggc

SEQ ID NO: 10780 - DNA, 31 bp, Artificial Sequence
  Description of Artificial Sequence:  Enzymatic Nucleic Acid
taagaataggctagctacaacgaattacttg

SEQ ID NO: 10781 - DNA, 31 bp, Artificial Sequence
  Description of Artificial Sequence:  Enzymatic Nucleic Acid
actaagaaggctagctacaacgaatattact

SEQ ID NO: 10782 - DNA, 31 bp, Artificial Sequence
  Description of Artificial Sequence:  Enzymatic Nucleic Acid
tgtatctaggctagctacaacgataagaata

SEQ ID NO: 10783 - DNA, 31 bp, Artificial Sequence
  Description of Artificial Sequence:  Enzymatic Nucleic Acid
gttttgtaggctagctacaacgactactaag

SEQ ID NO: 10784 - DNA, 31 bp, Artificial Sequence
  Description of Artificial Sequence:  Enzymatic Nucleic Acid
ttgttttgggctagctacaacgaatctacta

SEQ ID NO: 10785 - DNA, 31 bp, Artificial Sequence
  Description of Artificial Sequence:  Enzymatic Nucleic Acid
tttacttgggctagctacaacgatttgtatc

SEQ ID NO: 10786 - DNA, 31 bp, Artificial Sequence
  Description of Artificial Sequence:  Enzymatic Nucleic Acid
aatctttaggctagctacaacgattgttttg

SEQ ID NO: 10787 - DNA, 31 bp, Artificial Sequence
  Description of Artificial Sequence:  Enzymatic Nucleic Acid
gtctccaaggctagctacaacgactttactt

SEQ ID NO: 10788 - DNA, 31 bp, Artificial Sequence
  Description of Artificial Sequence:  Enzymatic Nucleic Acid
gtccaaagggctagctacaacgactccaatc

SEQ ID NO: 10789 - DNA, 31 bp, Artificial Sequence
  Description of Artificial Sequence:  Enzymatic Nucleic Acid
gttacaagggctagctacaacgaccaaagtc

SEQ ID NO: 10790 - DNA, 31 bp, Artificial Sequence
  Description of Artificial Sequence:  Enzymatic Nucleic Acid
agatgttaggctagctacaacgaaagtccaa

SEQ ID NO: 10791 - DNA, 31 bp, Artificial Sequence
  Description of Artificial Sequence:  Enzymatic Nucleic Acid
cagagatgggctagctacaacgatacaagtc

SEQ ID NO: 10792 - DNA, 31 bp, Artificial Sequence
  Description of Artificial Sequence:  Enzymatic Nucleic Acid
ttcagagaggctagctacaacgagttacaag

SEQ ID NO: 10793 - DNA, 31 bp, Artificial Sequence
  Description of Artificial Sequence:  Enzymatic Nucleic Acid
ttccatcaggctagctacaacgattttcaga

SEQ ID NO: 10794 - DNA, 31 bp, Artificial Sequence
  Description of Artificial Sequence:  Enzymatic Nucleic Acid
gctttccaggctagctacaacgacatttttc

SEQ ID NO: 10795 - DNA, 31 bp, Artificial Sequence
  Description of Artificial Sequence:  Enzymatic Nucleic Acid
cttgttcgggctagctacaacgatttccatc

SEQ ID NO: 10796 - DNA, 31 bp, Artificial Sequence
  Description of Artificial Sequence:  Enzymatic Nucleic Acid
actccttgggctagctacaacgatcgctttc

SEQ ID NO: 10797 - DNA, 31 bp, Artificial Sequence
  Description of Artificial Sequence:  Enzymatic Nucleic Acid
ttcccttaggctagctacaacgatccttgtt

SEQ ID NO: 10798 - DNA, 31 bp, Artificial Sequence
  Description of Artificial Sequence:  Enzymatic Nucleic Acid
tcgcaaagggctagctacaacgatcccttac

SEQ ID NO: 10799 - DNA, 31 bp, Artificial Sequence
  Description of Artificial Sequence:  Enzymatic Nucleic Acid
atgtatcgggctagctacaacgaaaagttcc

SEQ ID NO: 10800 - DNA, 31 bp, Artificial Sequence
  Description of Artificial Sequence:  Enzymatic Nucleic Acid
ctcatgtaggctagctacaacgacgcaaagt

SEQ ID NO: 10801 - DNA, 31 bp, Artificial Sequence
  Description of Artificial Sequence:  Enzymatic Nucleic Acid
ggctcatgggctagctacaacgaatcgcaaa

SEQ ID NO: 10802 - DNA, 31 bp, Artificial Sequence
  Description of Artificial Sequence:  Enzymatic Nucleic Acid
tgggctcaggctagctacaacgagtatcgca

SEQ ID NO: 10803 - DNA, 31 bp, Artificial Sequence
  Description of Artificial Sequence:  Enzymatic Nucleic Acid
gttctgggggctagctacaacgatcatgtat

SEQ ID NO: 10804 - DNA, 31 bp, Artificial Sequence
  Description of Artificial Sequence:  Enzymatic Nucleic Acid
gaaatctgggctagctacaacgatctgggct

SEQ ID NO: 10805 - DNA, 31 bp, Artificial Sequence
  Description of Artificial Sequence:  Enzymatic Nucleic Acid
cgaagaaaggctagctacaacgactgttctg

SEQ ID NO: 10806 - DNA, 31 bp, Artificial Sequence
  Description of Artificial Sequence:  Enzymatic Nucleic Acid
tagtcttgggctagctacaacgagaagaaat

SEQ ID NO: 10807 - DNA, 31 bp, Artificial Sequence
  Description of Artificial Sequence:  Enzymatic Nucleic Acid
ttccatagggctagctacaacgacttgcgaa

SEQ ID NO: 10808 - DNA, 31 bp, Artificial Sequence
  Description of Artificial Sequence:  Enzymatic Nucleic Acid
cctttccaggctagctacaacgaagtcttgc

SEQ ID NO: 10809 - DNA, 31 bp, Artificial Sequence
  Description of Artificial Sequence:  Enzymatic Nucleic Acid
gaggtccaggctagctacaacgattcctttc

SEQ ID NO: 10810 - DNA, 31 bp, Artificial Sequence
  Description of Artificial Sequence:  Enzymatic Nucleic Acid
cgtagaggggctagctacaacgaccacttcc

SEQ ID NO: 10811 - DNA, 31 bp, Artificial Sequence
  Description of Artificial Sequence:  Enzymatic Nucleic Acid
ccaaagcgggctagctacaacgaagaggtcc

SEQ ID NO: 10812 - DNA, 31 bp, Artificial Sequence
  Description of Artificial Sequence:  Enzymatic Nucleic Acid
ccccaaagggctagctacaacgagtagaggt

SEQ ID NO: 10813 - DNA, 31 bp, Artificial Sequence
  Description of Artificial Sequence:  Enzymatic Nucleic Acid
agaattagggctagctacaacgacccaaagc

SEQ ID NO: 10814 - DNA, 31 bp, Artificial Sequence
  Description of Artificial Sequence:  Enzymatic Nucleic Acid
agcaagaaggctagctacaacgatagcccca

SEQ ID NO: 10815 - DNA, 31 bp, Artificial Sequence
  Description of Artificial Sequence:  Enzymatic Nucleic Acid
aagttcagggctagctacaacgaaagaatta

SEQ ID NO: 10816 - DNA, 31 bp, Artificial Sequence
  Description of Artificial Sequence:  Enzymatic Nucleic Acid
tgaagaagggctagctacaacgatcagcaag

SEQ ID NO: 10817 - DNA, 31 bp, Artificial Sequence
  Description of Artificial Sequence:  Enzymatic Nucleic Acid
cacatacaggctagctacaacgagaagaagt

SEQ ID NO: 10818 - DNA, 31 bp, Artificial Sequence
  Description of Artificial Sequence:  Enzymatic Nucleic Acid
gtcacataggctagctacaacgaatgaagaa

SEQ ID NO: 10819 - DNA, 31 bp, Artificial Sequence
  Description of Artificial Sequence:  Enzymatic Nucleic Acid
gtgtcacaggctagctacaacgaacatgaag

SEQ ID NO: 10820 - DNA, 31 bp, Artificial Sequence
  Description of Artificial Sequence:  Enzymatic Nucleic Acid
cagtgtcaggctagctacaacgaatacatga

SEQ ID NO: 10821 - DNA, 31 bp, Artificial Sequence
  Description of Artificial Sequence:  Enzymatic Nucleic Acid
aagcagtgggctagctacaacgacacataca

SEQ ID NO: 10822 - DNA, 31 bp, Artificial Sequence
  Description of Artificial Sequence:  Enzymatic Nucleic Acid
aaaagcagggctagctacaacgagtcacata

SEQ ID NO: 10823 - DNA, 31 bp, Artificial Sequence
  Description of Artificial Sequence:  Enzymatic Nucleic Acid
ttcaaaagggctagctacaacgaagtgtcac

SEQ ID NO: 10824 - DNA, 31 bp, Artificial Sequence
  Description of Artificial Sequence:  Enzymatic Nucleic Acid
ctttgatgggctagctacaacgattcaaaag

SEQ ID NO: 10825 - DNA, 31 bp, Artificial Sequence
  Description of Artificial Sequence:  Enzymatic Nucleic Acid
aactttgaggctagctacaacgagtttcaaa

SEQ ID NO: 10826 - DNA, 31 bp, Artificial Sequence
  Description of Artificial Sequence:  Enzymatic Nucleic Acid
gtgaaaaaggctagctacaacgatttgatgt

SEQ ID NO: 10827 - DNA, 31 bp, Artificial Sequence
  Description of Artificial Sequence:  Enzymatic Nucleic Acid
taggtctgggctagctacaacgagaaaaact

SEQ ID NO: 10828 - DNA, 31 bp, Artificial Sequence
  Description of Artificial Sequence:  Enzymatic Nucleic Acid
cccgtaggggctagctacaacgactgtgaaa

SEQ ID NO: 10829 - DNA, 31 bp, Artificial Sequence
  Description of Artificial Sequence:  Enzymatic Nucleic Acid
ccatcccgggctagctacaacgaaggtctgt

SEQ ID NO: 10830 - DNA, 31 bp, Artificial Sequence
  Description of Artificial Sequence:  Enzymatic Nucleic Acid
tgatgccaggctagctacaacgacccgtagg

SEQ ID NO: 10831 - DNA, 31 bp, Artificial Sequence
  Description of Artificial Sequence:  Enzymatic Nucleic Acid
agatgatgggctagctacaacgacatcccgt

SEQ ID NO: 10832 - DNA, 31 bp, Artificial Sequence
  Description of Artificial Sequence:  Enzymatic Nucleic Acid
tgagatgaggctagctacaacgagccatccc

SEQ ID NO: 10833 - DNA, 31 bp, Artificial Sequence
  Description of Artificial Sequence:  Enzymatic Nucleic Acid
atctgagaggctagctacaacgagatgccat

SEQ ID NO: 10834 - DNA, 31 bp, Artificial Sequence
  Description of Artificial Sequence:  Enzymatic Nucleic Acid
caaatataggctagctacaacgactgagatg

SEQ ID NO: 10835 - DNA, 31 bp, Artificial Sequence
  Description of Artificial Sequence:  Enzymatic Nucleic Acid
atcaaataggctagctacaacgaatctgaga

SEQ ID NO: 10836 - DNA, 31 bp, Artificial Sequence
  Description of Artificial Sequence:  Enzymatic Nucleic Acid
ttatcaaaggctagctacaacgaatatctga

SEQ ID NO: 10837 - DNA, 31 bp, Artificial Sequence
  Description of Artificial Sequence:  Enzymatic Nucleic Acid
cttttttaggctagctacaacgacaaatata

SEQ ID NO: 10838 - DNA, 31 bp, Artificial Sequence
  Description of Artificial Sequence:  Enzymatic Nucleic Acid
tagaagagggctagctacaacgatttttctt

SEQ ID NO: 10839 - DNA, 31 bp, Artificial Sequence
  Description of Artificial Sequence:  Enzymatic Nucleic Acid
aatttctgggctagctacaacgaagaagagt

SEQ ID NO: 10840 - DNA, 31 bp, Artificial Sequence
  Description of Artificial Sequence:  Enzymatic Nucleic Acid
gagagtaaggctagctacaacgattctgtag

SEQ ID NO: 10841 - DNA, 31 bp, Artificial Sequence
  Description of Artificial Sequence:  Enzymatic Nucleic Acid
tttgagagggctagctacaacgaaatttctg

SEQ ID NO: 10842 - DNA, 31 bp, Artificial Sequence
  Description of Artificial Sequence:  Enzymatic Nucleic Acid
tcctcaggggctagctacaacgattctttga

SEQ ID NO: 10843 - DNA, 31 bp, Artificial Sequence
  Description of Artificial Sequence:  Enzymatic Nucleic Acid
taggtcgaggctagctacaacgacctcaggt

SEQ ID NO: 10844 - DNA, 31 bp, Artificial Sequence
  Description of Artificial Sequence:  Enzymatic Nucleic Acid
gtgttaggggctagctacaacgacgatcctc

SEQ ID NO: 10845 - DNA, 31 bp, Artificial Sequence
  Description of Artificial Sequence:  Enzymatic Nucleic Acid
cagatgtgggctagctacaacgataggtcga

SEQ ID NO: 10846 - DNA, 31 bp, Artificial Sequence
  Description of Artificial Sequence:  Enzymatic Nucleic Acid
ttcagatgggctagctacaacgagttaggtc

SEQ ID NO: 10847 - DNA, 31 bp, Artificial Sequence
  Description of Artificial Sequence:  Enzymatic Nucleic Acid
atttcagaggctagctacaacgagtgttagg

SEQ ID NO: 10848 - DNA, 31 bp, Artificial Sequence
  Description of Artificial Sequence:  Enzymatic Nucleic Acid
ccttagtaggctagctacaacgattcagatg

SEQ ID NO: 10849 - DNA, 31 bp, Artificial Sequence
  Description of Artificial Sequence:  Enzymatic Nucleic Acid
gtccttagggctagctacaacgaatttcaga

SEQ ID NO: 10850 - DNA, 31 bp, Artificial Sequence
  Description of Artificial Sequence:  Enzymatic Nucleic Acid
agtcaaggggctagctacaacgaccttagta

SEQ ID NO: 10851 - DNA, 31 bp, Artificial Sequence
  Description of Artificial Sequence:  Enzymatic Nucleic Acid
ccacacagggctagctacaacgacaaggtcc

SEQ ID NO: 10852 - DNA, 31 bp, Artificial Sequence
  Description of Artificial Sequence:  Enzymatic Nucleic Acid
cttccacaggctagctacaacgaagtcaagg

SEQ ID NO: 10853 - DNA, 31 bp, Artificial Sequence
  Description of Artificial Sequence:  Enzymatic Nucleic Acid
ttcttccaggctagctacaacgaacagtcaa

SEQ ID NO: 10854 - DNA, 31 bp, Artificial Sequence
  Description of Artificial Sequence:  Enzymatic Nucleic Acid
tctctgggggctagctacaacgattttcttc

SEQ ID NO: 10855 - DNA, 31 bp, Artificial Sequence
  Description of Artificial Sequence:  Enzymatic Nucleic Acid
gtcgttcaggctagctacaacgattttctct

SEQ ID NO: 10856 - DNA, 31 bp, Artificial Sequence
  Description of Artificial Sequence:  Enzymatic Nucleic Acid
gtgtgtcgggctagctacaacgatcattttt

SEQ ID NO: 10857 - DNA, 31 bp, Artificial Sequence
  Description of Artificial Sequence:  Enzymatic Nucleic Acid
catgtgtgggctagctacaacgacgttcatt

SEQ ID NO: 10858 - DNA, 31 bp, Artificial Sequence
  Description of Artificial Sequence:  Enzymatic Nucleic Acid
aacatgtgggctagctacaacgagtcgttca

SEQ ID NO: 10859 - DNA, 31 bp, Artificial Sequence
  Description of Artificial Sequence:  Enzymatic Nucleic Acid
ctaacatgggctagctacaacgagtgtcgtt

SEQ ID NO: 10860 - DNA, 31 bp, Artificial Sequence
  Description of Artificial Sequence:  Enzymatic Nucleic Acid
ctctaacaggctagctacaacgagtgtgtcg

SEQ ID NO: 10861 - DNA, 31 bp, Artificial Sequence
  Description of Artificial Sequence:  Enzymatic Nucleic Acid
ggctctaaggctagctacaacgaatgtgtgt

SEQ ID NO: 10862 - DNA, 31 bp, Artificial Sequence
  Description of Artificial Sequence:  Enzymatic Nucleic Acid
cagaagggggctagctacaacgatctaacat

SEQ ID NO: 10863 - DNA, 31 bp, Artificial Sequence
  Description of Artificial Sequence:  Enzymatic Nucleic Acid
gcaggataggctagctacaacgatttttcag

SEQ ID NO: 10864 - DNA, 31 bp, Artificial Sequence
  Description of Artificial Sequence:  Enzymatic Nucleic Acid
aagcaggaggctagctacaacgaactttttc

SEQ ID NO: 10865 - DNA, 31 bp, Artificial Sequence
  Description of Artificial Sequence:  Enzymatic Nucleic Acid
atcagaagggctagctacaacgaaggatact

SEQ ID NO: 10866 - DNA, 31 bp, Artificial Sequence
  Description of Artificial Sequence:  Enzymatic Nucleic Acid
actgcataggctagctacaacgacagaagca

SEQ ID NO: 10867 - DNA, 31 bp, Artificial Sequence
  Description of Artificial Sequence:  Enzymatic Nucleic Acid
aaactgcaggctagctacaacgaatcagaag

SEQ ID NO: 10868 - DNA, 31 bp, Artificial Sequence
  Description of Artificial Sequence:  Enzymatic Nucleic Acid
gaaaactgggctagctacaacgaatatcaga

SEQ ID NO: 10869 - DNA, 31 bp, Artificial Sequence
  Description of Artificial Sequence:  Enzymatic Nucleic Acid
aaggaaaaggctagctacaacgatgcatatc

SEQ ID NO: 10870 - DNA, 31 bp, Artificial Sequence
  Description of Artificial Sequence:  Enzymatic Nucleic Acid
ttagataaggctagctacaacgattaaggaa

SEQ ID NO: 10871 - DNA, 31 bp, Artificial Sequence
  Description of Artificial Sequence:  Enzymatic Nucleic Acid
attttagaggctagctacaacgaaatttaag

SEQ ID NO: 10872 - DNA, 31 bp, Artificial Sequence
  Description of Artificial Sequence:  Enzymatic Nucleic Acid
ctagcagaggctagctacaacgatttagata

SEQ ID NO: 10873 - DNA, 31 bp, Artificial Sequence
  Description of Artificial Sequence:  Enzymatic Nucleic Acid
ttccctagggctagctacaacgaagatttta

SEQ ID NO: 10874 - DNA, 31 bp, Artificial Sequence
  Description of Artificial Sequence:  Enzymatic Nucleic Acid
tattgataggctagctacaacgatccctagc

SEQ ID NO: 10875 - DNA, 31 bp, Artificial Sequence
  Description of Artificial Sequence:  Enzymatic Nucleic Acid
tctattgaggctagctacaacgaattcccta

SEQ ID NO: 10876 - DNA, 31 bp, Artificial Sequence
  Description of Artificial Sequence:  Enzymatic Nucleic Acid
aatatctaggctagctacaacgatgatattc

SEQ ID NO: 10877 - DNA, 31 bp, Artificial Sequence
  Description of Artificial Sequence:  Enzymatic Nucleic Acid
ggtaaataggctagctacaacgactattgat

SEQ ID NO: 10878 - DNA, 31 bp, Artificial Sequence
  Description of Artificial Sequence:  Enzymatic Nucleic Acid
aaggtaaaggctagctacaacgaatctattg

SEQ ID NO: 10879 - DNA, 31 bp, Artificial Sequence
  Description of Artificial Sequence:  Enzymatic Nucleic Acid
ataaaaggggctagctacaacgaaaatatct

SEQ ID NO: 10880 - DNA, 31 bp, Artificial Sequence
  Description of Artificial Sequence:  Enzymatic Nucleic Acid
cattaaaaggctagctacaacgaaaaaggta

SEQ ID NO: 10881 - DNA, 31 bp, Artificial Sequence
  Description of Artificial Sequence:  Enzymatic Nucleic Acid
aggaaacaggctagctacaacgataaaataa

SEQ ID NO: 10882 - DNA, 31 bp, Artificial Sequence
  Description of Artificial Sequence:  Enzymatic Nucleic Acid
aaaggaaaggctagctacaacgaattaaaat

SEQ ID NO: 10883 - DNA, 31 bp, Artificial Sequence
  Description of Artificial Sequence:  Enzymatic Nucleic Acid
gtaaaaaaggctagctacaacgataaaggaa

SEQ ID NO: 10884 - DNA, 31 bp, Artificial Sequence
  Description of Artificial Sequence:  Enzymatic Nucleic Acid
aaaaatagggctagctacaacgaaaaaaatt

SEQ ID NO: 10885 - DNA, 31 bp, Artificial Sequence
  Description of Artificial Sequence:  Enzymatic Nucleic Acid
agtaaaaaggctagctacaacgaagtaaaaa

SEQ ID NO: 10886 - DNA, 31 bp, Artificial Sequence
  Description of Artificial Sequence:  Enzymatic Nucleic Acid
aagattagggctagctacaacgaaaaaatag

SEQ ID NO: 10887 - DNA, 31 bp, Artificial Sequence
  Description of Artificial Sequence:  Enzymatic Nucleic Acid
cagaaagaggctagctacaacgatagtaaaa

SEQ ID NO: 10888 - DNA, 31 bp, Artificial Sequence
  Description of Artificial Sequence:  Enzymatic Nucleic Acid
tgtttctgggctagctacaacgaagaaagat

SEQ ID NO: 10889 - DNA, 31 bp, Artificial Sequence
  Description of Artificial Sequence:  Enzymatic Nucleic Acid
cctttctgggctagctacaacgattctgcag

SEQ ID NO: 10890 - DNA, 31 bp, Artificial Sequence
  Description of Artificial Sequence:  Enzymatic Nucleic Acid
gaagaaaaggctagctacaacgactttctgt

SEQ ID NO: 10891 - DNA, 31 bp, Artificial Sequence
  Description of Artificial Sequence:  Enzymatic Nucleic Acid
ttttgaagggctagctacaacgaaaaaagaa

SEQ ID NO: 10892 - DNA, 31 bp, Artificial Sequence
  Description of Artificial Sequence:  Enzymatic Nucleic Acid
taagaatgggctagctacaacgattttgaag

SEQ ID NO: 10893 - DNA, 31 bp, Artificial Sequence
  Description of Artificial Sequence:  Enzymatic Nucleic Acid
tgtaagaaggctagctacaacgagtttttga

SEQ ID NO: 10894 - DNA, 31 bp, Artificial Sequence
  Description of Artificial Sequence:  Enzymatic Nucleic Acid
gtaaaatgggctagctacaacgaaagaatgt

SEQ ID NO: 10895 - DNA, 31 bp, Artificial Sequence
  Description of Artificial Sequence:  Enzymatic Nucleic Acid
aagtaaaaggctagctacaacgagtaagaat

SEQ ID NO: 10896 - DNA, 31 bp, Artificial Sequence
  Description of Artificial Sequence:  Enzymatic Nucleic Acid
ggaaaaagggctagctacaacgaaaaatgta

SEQ ID NO: 10897 - DNA, 31 bp, Artificial Sequence
  Description of Artificial Sequence:  Enzymatic Nucleic Acid
gagatgagggctagctacaacgacaggaaaa

SEQ ID NO: 10898 - DNA, 31 bp, Artificial Sequence
  Description of Artificial Sequence:  Enzymatic Nucleic Acid
taaagagaggctagctacaacgagagccagg

SEQ ID NO: 10899 - DNA, 31 bp, Artificial Sequence
  Description of Artificial Sequence:  Enzymatic Nucleic Acid
aaaaagaaggctagctacaacgaaaagagat

SEQ ID NO: 10900 - DNA, 31 bp, Artificial Sequence
  Description of Artificial Sequence:  Enzymatic Nucleic Acid
agactctgggctagctacaacgactttaaaa

SEQ ID NO: 10901 - DNA, 31 bp, Artificial Sequence
  Description of Artificial Sequence:  Enzymatic Nucleic Acid
gagcgagaggctagctacaacgatctgtctt

SEQ ID NO: 10902 - DNA, 31 bp, Artificial Sequence
  Description of Artificial Sequence:  Enzymatic Nucleic Acid
caacagagggctagctacaacgagagactct

SEQ ID NO: 10903 - DNA, 31 bp, Artificial Sequence
  Description of Artificial Sequence:  Enzymatic Nucleic Acid
ctgggcaaggctagctacaacgaagagcgag

SEQ ID NO: 10904 - DNA, 31 bp, Artificial Sequence
  Description of Artificial Sequence:  Enzymatic Nucleic Acid
agcctgggggctagctacaacgaaacagagc

SEQ ID NO: 10905 - DNA, 31 bp, Artificial Sequence
  Description of Artificial Sequence:  Enzymatic Nucleic Acid
cactccagggctagctacaacgactgggcaa

SEQ ID NO: 10906 - DNA, 31 bp, Artificial Sequence
  Description of Artificial Sequence:  Enzymatic Nucleic Acid
tcattgcaggctagctacaacgatccagcct

SEQ ID NO: 10907 - DNA, 31 bp, Artificial Sequence
  Description of Artificial Sequence:  Enzymatic Nucleic Acid
tgtcattgggctagctacaacgaactccagc

SEQ ID NO: 10908 - DNA, 31 bp, Artificial Sequence
  Description of Artificial Sequence:  Enzymatic Nucleic Acid
ctgtgtcaggctagctacaacgatgcactcc

SEQ ID NO: 10909 - DNA, 31 bp, Artificial Sequence
  Description of Artificial Sequence:  Enzymatic Nucleic Acid
agactgtgggctagctacaacgacattgcac

SEQ ID NO: 10910 - DNA, 31 bp, Artificial Sequence
  Description of Artificial Sequence:  Enzymatic Nucleic Acid
caagactgggctagctacaacgagtcattgc

SEQ ID NO: 10911 - DNA, 31 bp, Artificial Sequence
  Description of Artificial Sequence:  Enzymatic Nucleic Acid
agccaagaggctagctacaacgatgtgtcat

SEQ ID NO: 10912 - DNA, 31 bp, Artificial Sequence
  Description of Artificial Sequence:  Enzymatic Nucleic Acid
gcagtgagggctagctacaacgacaagactg

SEQ ID NO: 10913 - DNA, 31 bp, Artificial Sequence
  Description of Artificial Sequence:  Enzymatic Nucleic Acid
agttgcagggctagctacaacgagagccaag

SEQ ID NO: 10914 - DNA, 31 bp, Artificial Sequence
  Description of Artificial Sequence:  Enzymatic Nucleic Acid
agaagttgggctagctacaacgaagtgagcc

SEQ ID NO: 10915 - DNA, 31 bp, Artificial Sequence
  Description of Artificial Sequence:  Enzymatic Nucleic Acid
ggcagaagggctagctacaacgatgcagtga

SEQ ID NO: 10916 - DNA, 31 bp, Artificial Sequence
  Description of Artificial Sequence:  Enzymatic Nucleic Acid
ccaagaggggctagctacaacgaagaagttg

SEQ ID NO: 10917 - DNA, 31 bp, Artificial Sequence
  Description of Artificial Sequence:  Enzymatic Nucleic Acid
cacttgaaggctagctacaacgaccaagagg

SEQ ID NO: 10918 - DNA, 31 bp, Artificial Sequence
  Description of Artificial Sequence:  Enzymatic Nucleic Acid
gagaatcaggctagctacaacgattgaaccc

SEQ ID NO: 10919 - DNA, 31 bp, Artificial Sequence
  Description of Artificial Sequence:  Enzymatic Nucleic Acid
caggagaaggctagctacaacgacacttgaa

SEQ ID NO: 10920 - DNA, 31 bp, Artificial Sequence
  Description of Artificial Sequence:  Enzymatic Nucleic Acid
ggctgaggggctagctacaacgaaggagaat

SEQ ID NO: 10921 - DNA, 31 bp, Artificial Sequence
  Description of Artificial Sequence:  Enzymatic Nucleic Acid
tcaggaggggctagctacaacgatgaggcag

SEQ ID NO: 10922 - DNA, 31 bp, Artificial Sequence
  Description of Artificial Sequence:  Enzymatic Nucleic Acid
tccagctaggctagctacaacgatcaggagg

SEQ ID NO: 10923 - DNA, 31 bp, Artificial Sequence
  Description of Artificial Sequence:  Enzymatic Nucleic Acid
taatccagggctagctacaacgatactcagg

SEQ ID NO: 10924 - DNA, 31 bp, Artificial Sequence
  Description of Artificial Sequence:  Enzymatic Nucleic Acid
gcctgtaaggctagctacaacgaccagctac

SEQ ID NO: 10925 - DNA, 31 bp, Artificial Sequence
  Description of Artificial Sequence:  Enzymatic Nucleic Acid
catgcctgggctagctacaacgaaatccagc

SEQ ID NO: 10926 - DNA, 31 bp, Artificial Sequence
  Description of Artificial Sequence:  Enzymatic Nucleic Acid
ggcacatgggctagctacaacgactgtaatc

SEQ ID NO: 10927 - DNA, 31 bp, Artificial Sequence
  Description of Artificial Sequence:  Enzymatic Nucleic Acid
gtggcacaggctagctacaacgagcctgtaa

SEQ ID NO: 10928 - DNA, 31 bp, Artificial Sequence
  Description of Artificial Sequence:  Enzymatic Nucleic Acid
gggtggcaggctagctacaacgaatgcctgt

SEQ ID NO: 10929 - DNA, 31 bp, Artificial Sequence
  Description of Artificial Sequence:  Enzymatic Nucleic Acid
gtgggtggggctagctacaacgaacatgcct

SEQ ID NO: 10930 - DNA, 31 bp, Artificial Sequence
  Description of Artificial Sequence:  Enzymatic Nucleic Acid
tgggtgggggctagctacaacgaggcacatg

SEQ ID NO: 10931 - DNA, 31 bp, Artificial Sequence
  Description of Artificial Sequence:  Enzymatic Nucleic Acid
tagttgggggctagctacaacgagggtggca

SEQ ID NO: 10932 - DNA, 31 bp, Artificial Sequence
  Description of Artificial Sequence:  Enzymatic Nucleic Acid
aaaattagggctagctacaacgatgggtggg

SEQ ID NO: 10933 - DNA, 31 bp, Artificial Sequence
  Description of Artificial Sequence:  Enzymatic Nucleic Acid
cacaaaaaggctagctacaacgatagttggg

SEQ ID NO: 10934 - DNA, 31 bp, Artificial Sequence
  Description of Artificial Sequence:  Enzymatic Nucleic Acid
taaaaacaggctagctacaacgaaaaaatta

SEQ ID NO: 10935 - DNA, 31 bp, Artificial Sequence
  Description of Artificial Sequence:  Enzymatic Nucleic Acid
attaaaaaggctagctacaacgaacaaaaat

SEQ ID NO: 10936 - DNA, 31 bp, Artificial Sequence
  Description of Artificial Sequence:  Enzymatic Nucleic Acid
tgtctttaggctagctacaacgataaaaaca

SEQ ID NO: 10937 - DNA, 31 bp, Artificial Sequence
  Description of Artificial Sequence:  Enzymatic Nucleic Acid
aaaccctgggctagctacaacgactttatta

SEQ ID NO: 10938 - DNA, 31 bp, Artificial Sequence
  Description of Artificial Sequence:  Enzymatic Nucleic Acid
tggtgaaaggctagctacaacgacctgtctt

SEQ ID NO: 10939 - DNA, 31 bp, Artificial Sequence
  Description of Artificial Sequence:  Enzymatic Nucleic Acid
caacatggggctagctacaacgagaaaccct

SEQ ID NO: 10940 - DNA, 31 bp, Artificial Sequence
  Description of Artificial Sequence:  Enzymatic Nucleic Acid
ggccaacaggctagctacaacgaggtgaaac

SEQ ID NO: 10941 - DNA, 31 bp, Artificial Sequence
  Description of Artificial Sequence:  Enzymatic Nucleic Acid
ctggccaaggctagctacaacgaatggtgaa

SEQ ID NO: 10942 - DNA, 31 bp, Artificial Sequence
  Description of Artificial Sequence:  Enzymatic Nucleic Acid
cagcctggggctagctacaacgacaacatgg

SEQ ID NO: 10943 - DNA, 31 bp, Artificial Sequence
  Description of Artificial Sequence:  Enzymatic Nucleic Acid
gagaccagggctagctacaacgactggccaa

SEQ ID NO: 10944 - DNA, 31 bp, Artificial Sequence
  Description of Artificial Sequence:  Enzymatic Nucleic Acid
gtttgagaggctagctacaacgacagcctgg

SEQ ID NO: 10945 - DNA, 31 bp, Artificial Sequence
  Description of Artificial Sequence:  Enzymatic Nucleic Acid
gtcaggagggctagctacaacgattgagacc

SEQ ID NO: 10946 - DNA, 31 bp, Artificial Sequence
  Description of Artificial Sequence:  Enzymatic Nucleic Acid
acttgaggggctagctacaacgacaggagtt

SEQ ID NO: 10947 - DNA, 31 bp, Artificial Sequence
  Description of Artificial Sequence:  Enzymatic Nucleic Acid
gtggattaggctagctacaacgattgaggtc

SEQ ID NO: 10948 - DNA, 31 bp, Artificial Sequence
  Description of Artificial Sequence:  Enzymatic Nucleic Acid
caggtggaggctagctacaacgatacttgag

SEQ ID NO: 10949 - DNA, 31 bp, Artificial Sequence
  Description of Artificial Sequence:  Enzymatic Nucleic Acid
gaggcaggggctagctacaacgaggattact

SEQ ID NO: 10950 - DNA, 31 bp, Artificial Sequence
  Description of Artificial Sequence:  Enzymatic Nucleic Acid
ggccgaggggctagctacaacgaaggtggat

SEQ ID NO: 10951 - DNA, 31 bp, Artificial Sequence
  Description of Artificial Sequence:  Enzymatic Nucleic Acid
ttgggaggggctagctacaacgacgaggcag

SEQ ID NO: 10952 - DNA, 31 bp, Artificial Sequence
  Description of Artificial Sequence:  Enzymatic Nucleic Acid
tcccagcaggctagctacaacgatttgggag

SEQ ID NO: 10953 - DNA, 31 bp, Artificial Sequence
  Description of Artificial Sequence:  Enzymatic Nucleic Acid
aatcccagggctagctacaacgaactttggg

SEQ ID NO: 10954 - DNA, 31 bp, Artificial Sequence
  Description of Artificial Sequence:  Enzymatic Nucleic Acid
ccctgtaaggctagctacaacgacccagcac

SEQ ID NO: 10955 - DNA, 31 bp, Artificial Sequence
  Description of Artificial Sequence:  Enzymatic Nucleic Acid
catccctgggctagctacaacgaaatcccag

SEQ ID NO: 10956 - DNA, 31 bp, Artificial Sequence
  Description of Artificial Sequence:  Enzymatic Nucleic Acid
gtggctcaggctagctacaacgaccctgtaa

SEQ ID NO: 10957 - DNA, 31 bp, Artificial Sequence
  Description of Artificial Sequence:  Enzymatic Nucleic Acid
cgcggtggggctagctacaacgatcatccct

SEQ ID NO: 10958 - DNA, 31 bp, Artificial Sequence
  Description of Artificial Sequence:  Enzymatic Nucleic Acid
gggcgcggggctagctacaacgaggctcatc

SEQ ID NO: 10959 - DNA, 31 bp, Artificial Sequence
  Description of Artificial Sequence:  Enzymatic Nucleic Acid
gctgggcgggctagctacaacgaggtggctc

SEQ ID NO: 10960 - DNA, 31 bp, Artificial Sequence
  Description of Artificial Sequence:  Enzymatic Nucleic Acid
aggctgggggctagctacaacgagcggtggc

SEQ ID NO: 10961 - DNA, 31 bp, Artificial Sequence
  Description of Artificial Sequence:  Enzymatic Nucleic Acid
agatgaggggctagctacaacgatgggcgcg

SEQ ID NO: 10962 - DNA, 31 bp, Artificial Sequence
  Description of Artificial Sequence:  Enzymatic Nucleic Acid
caaagagaggctagctacaacgagaggctgg

SEQ ID NO: 10963 - DNA, 31 bp, Artificial Sequence
  Description of Artificial Sequence:  Enzymatic Nucleic Acid
ctttagaaggctagctacaacgaaaagagat

SEQ ID NO: 10964 - DNA, 31 bp, Artificial Sequence
  Description of Artificial Sequence:  Enzymatic Nucleic Acid
tttttccaggctagctacaacgactttagaa

SEQ ID NO: 10965 - DNA, 31 bp, Artificial Sequence
  Description of Artificial Sequence:  Enzymatic Nucleic Acid
gggggtggggctagctacaacgattttccat

SEQ ID NO: 10966 - DNA, 31 bp, Artificial Sequence
  Description of Artificial Sequence:  Enzymatic Nucleic Acid
tttgggggggctagctacaacgaggtttttc

SEQ ID NO: 10967 - DNA, 31 bp, Artificial Sequence
  Description of Artificial Sequence:  Enzymatic Nucleic Acid
aaagaaaaggctagctacaacgattgggggt

SEQ ID NO: 10968 - DNA, 31 bp, Artificial Sequence
  Description of Artificial Sequence:  Enzymatic Nucleic Acid
taatagtaggctagctacaacgaaaaaagaa

SEQ ID NO: 10969 - DNA, 31 bp, Artificial Sequence
  Description of Artificial Sequence:  Enzymatic Nucleic Acid
attaatagggctagctacaacgaataaaaag

SEQ ID NO: 10970 - DNA, 31 bp, Artificial Sequence
  Description of Artificial Sequence:  Enzymatic Nucleic Acid
ttcattaaggctagctacaacgaagtataaa

SEQ ID NO: 10971 - DNA, 31 bp, Artificial Sequence
  Description of Artificial Sequence:  Enzymatic Nucleic Acid
ttgattcaggctagctacaacgataatagta

SEQ ID NO: 10972 - DNA, 31 bp, Artificial Sequence
  Description of Artificial Sequence:  Enzymatic Nucleic Acid
ttgattgaggctagctacaacgatcattaat

SEQ ID NO: 10973 - DNA, 31 bp, Artificial Sequence
  Description of Artificial Sequence:  Enzymatic Nucleic Acid
tgaattgaggctagctacaacgatgattcat

SEQ ID NO: 10974 - DNA, 31 bp, Artificial Sequence
  Description of Artificial Sequence:  Enzymatic Nucleic Acid
gatatgaaggctagctacaacgatgattgat

SEQ ID NO: 10975 - DNA, 31 bp, Artificial Sequence
  Description of Artificial Sequence:  Enzymatic Nucleic Acid
aatagataggctagctacaacgagaattgat

SEQ ID NO: 10976 - DNA, 31 bp, Artificial Sequence
  Description of Artificial Sequence:  Enzymatic Nucleic Acid
taaatagaggctagctacaacgaatgaattg

SEQ ID NO: 10977 - DNA, 31 bp, Artificial Sequence
  Description of Artificial Sequence:  Enzymatic Nucleic Acid
ttaataaaggctagctacaacgaagatatga

SEQ ID NO: 10978 - DNA, 31 bp, Artificial Sequence
  Description of Artificial Sequence:  Enzymatic Nucleic Acid
aaatttaaggctagctacaacgaaaatagat

SEQ ID NO: 10979 - DNA, 31 bp, Artificial Sequence
  Description of Artificial Sequence:  Enzymatic Nucleic Acid
ggtagaaaggctagctacaacgattaataaa

SEQ ID NO: 10980 - DNA, 31 bp, Artificial Sequence
  Description of Artificial Sequence:  Enzymatic Nucleic Acid
aaaagcggggctagctacaacgaagaaattt

SEQ ID NO: 10981 - DNA, 31 bp, Artificial Sequence
  Description of Artificial Sequence:  Enzymatic Nucleic Acid
cctaaaagggctagctacaacgaggtagaaa

SEQ ID NO: 10982 - DNA, 31 bp, Artificial Sequence
  Description of Artificial Sequence:  Enzymatic Nucleic Acid
ttttttggggctagctacaacgactaaaagc

SEQ ID NO: 10983 - DNA, 31 bp, Artificial Sequence
  Description of Artificial Sequence:  Enzymatic Nucleic Acid
atcttacaggctagctacaacgattttttgg

SEQ ID NO: 10984 - DNA, 31 bp, Artificial Sequence
  Description of Artificial Sequence:  Enzymatic Nucleic Acid
cgatcttaggctagctacaacgaattttttt

SEQ ID NO: 10985 - DNA, 31 bp, Artificial Sequence
  Description of Artificial Sequence:  Enzymatic Nucleic Acid
gagaacgaggctagctacaacgacttacatt

SEQ ID NO: 10986 - DNA, 31 bp, Artificial Sequence
  Description of Artificial Sequence:  Enzymatic Nucleic Acid
gcagagaaggctagctacaacgagatcttac

SEQ ID NO: 10987 - DNA, 31 bp, Artificial Sequence
  Description of Artificial Sequence:  Enzymatic Nucleic Acid
atgtgaggggctagctacaacgaagagaacg

SEQ ID NO: 10988 - DNA, 31 bp, Artificial Sequence
  Description of Artificial Sequence:  Enzymatic Nucleic Acid
aagctatgggctagctacaacgagaggcaga

SEQ ID NO: 10989 - DNA, 31 bp, Artificial Sequence
  Description of Artificial Sequence:  Enzymatic Nucleic Acid
gtaagctaggctagctacaacgagtgaggca

SEQ ID NO: 10990 - DNA, 31 bp, Artificial Sequence
  Description of Artificial Sequence:  Enzymatic Nucleic Acid
cttgtaagggctagctacaacgatatgtgag

SEQ ID NO: 10991 - DNA, 31 bp, Artificial Sequence
  Description of Artificial Sequence:  Enzymatic Nucleic Acid
ctggcttgggctagctacaacgaaagctatg

SEQ ID NO: 10992 - DNA, 31 bp, Artificial Sequence
  Description of Artificial Sequence:  Enzymatic Nucleic Acid
ccagctggggctagctacaacgattgtaagc

SEQ ID NO: 10993 - DNA, 31 bp, Artificial Sequence
  Description of Artificial Sequence:  Enzymatic Nucleic Acid
ttctccagggctagctacaacgatggcttgt

SEQ ID NO: 10994 - DNA, 31 bp, Artificial Sequence
  Description of Artificial Sequence:  Enzymatic Nucleic Acid
gtaccataggctagctacaacgattctccag

SEQ ID NO: 10995 - DNA, 31 bp, Artificial Sequence
  Description of Artificial Sequence:  Enzymatic Nucleic Acid
gagtaccaggctagctacaacgaatttctcc

SEQ ID NO: 10996 - DNA, 31 bp, Artificial Sequence
  Description of Artificial Sequence:  Enzymatic Nucleic Acid
aatgagtaggctagctacaacgacatatttc

SEQ ID NO: 10997 - DNA, 31 bp, Artificial Sequence
  Description of Artificial Sequence:  Enzymatic Nucleic Acid
ttaatgagggctagctacaacgaaccatatt

SEQ ID NO: 10998 - DNA, 31 bp, Artificial Sequence
  Description of Artificial Sequence:  Enzymatic Nucleic Acid
ttttttaaggctagctacaacgagagtacca

SEQ ID NO: 10999 - DNA, 31 bp, Artificial Sequence
  Description of Artificial Sequence:  Enzymatic Nucleic Acid
gtacatcaggctagctacaacgatttttttt

SEQ ID NO: 11000 - DNA, 31 bp, Artificial Sequence
  Description of Artificial Sequence:  Enzymatic Nucleic Acid
gttgtacaggctagctacaacgacacttttt

SEQ ID NO: 11001 - RNA, 48 nt, Artificial Sequence
  Description of Artificial Sequence:  Enzymatic Nucleic Acid
ugcgccgcggaggaaacucccuucaaggacaucguccggggccgccgc

SEQ ID NO: 11002 - RNA, 48 nt, Artificial Sequence
  Description of Artificial Sequence:  Enzymatic Nucleic Acid
cugcgccgggaggaaacucccuucaaggacaucguccgggcgccgccg

SEQ ID NO: 11003 - RNA, 48 nt, Artificial Sequence
  Description of Artificial Sequence:  Enzymatic Nucleic Acid
aacugcgcggaggaaacucccuucaaggacaucguccggggccgccgc

SEQ ID NO: 11004 - RNA, 48 nt, Artificial Sequence
  Description of Artificial Sequence:  Enzymatic Nucleic Acid
aaacugcgggaggaaacucccuucaaggacaucguccgggcgccgccg

SEQ ID NO: 11005 - RNA, 48 nt, Artificial Sequence
  Description of Artificial Sequence:  Enzymatic Nucleic Acid
gcaaacugggaggaaacucccuucaaggacaucguccggggccgccgc

SEQ ID NO: 11006 - RNA, 48 nt, Artificial Sequence
  Description of Artificial Sequence:  Enzymatic Nucleic Acid
ugagcaaaggaggaaacucccuucaaggacaucguccgggugcgccgc

SEQ ID NO: 11007 - RNA, 48 nt, Artificial Sequence
  Description of Artificial Sequence:  Enzymatic Nucleic Acid
aguaugagggaggaaacucccuucaaggacaucguccgggaaacugcg

SEQ ID NO: 11008 - RNA, 48 nt, Artificial Sequence
  Description of Artificial Sequence:  Enzymatic Nucleic Acid
gcaagucaggaggaaacucccuucaaggacaucguccgggaaaguaug

SEQ ID NO: 11009 - RNA, 48 nt, Artificial Sequence
  Description of Artificial Sequence:  Enzymatic Nucleic Acid
ccgcaaguggaggaaacucccuucaaggacaucguccgggacaaagua

SEQ ID NO: 11010 - RNA, 48 nt, Artificial Sequence
  Description of Artificial Sequence:  Enzymatic Nucleic Acid
ugugaccgggaggaaacucccuucaaggacaucguccgggaagucaca

SEQ ID NO: 11011 - RNA, 48 nt, Artificial Sequence
  Description of Artificial Sequence:  Enzymatic Nucleic Acid
acugugacggaggaaacucccuucaaggacaucguccggggcaaguca

SEQ ID NO: 11012 - RNA, 48 nt, Artificial Sequence
  Description of Artificial Sequence:  Enzymatic Nucleic Acid
cacugugaggaggaaacucccuucaaggacaucguccgggcgcaaguc

SEQ ID NO: 11013 - RNA, 48 nt, Artificial Sequence
  Description of Artificial Sequence:  Enzymatic Nucleic Acid
gaaugccaggaggaaacucccuucaaggacaucguccgggugugaccg

SEQ ID NO: 11014 - RNA, 48 nt, Artificial Sequence
  Description of Artificial Sequence:  Enzymatic Nucleic Acid
cugaaugcggaggaaacucccuucaaggacaucguccgggacugugac

SEQ ID NO: 11015 - RNA, 48 nt, Artificial Sequence
  Description of Artificial Sequence:  Enzymatic Nucleic Acid
gcugaaugggaggaaacucccuucaaggacaucguccgggcacuguga

SEQ ID NO: 11016 - RNA, 48 nt, Artificial Sequence
  Description of Artificial Sequence:  Enzymatic Nucleic Acid
guguggagggaggaaacucccuucaaggacaucguccgggugaaugcc

SEQ ID NO: 11017 - RNA, 48 nt, Artificial Sequence
  Description of Artificial Sequence:  Enzymatic Nucleic Acid
gguucuacggaggaaacucccuucaaggacaucguccgggaagugugg

SEQ ID NO: 11018 - RNA, 48 nt, Artificial Sequence
  Description of Artificial Sequence:  Enzymatic Nucleic Acid
ugguucuaggaggaaacucccuucaaggacaucguccgggcaagugug

SEQ ID NO: 11019 - RNA, 48 nt, Artificial Sequence
  Description of Artificial Sequence:  Enzymatic Nucleic Acid
cugugguuggaggaaacucccuucaaggacaucguccggguaccaagu

SEQ ID NO: 11020 - RNA, 48 nt, Artificial Sequence
  Description of Artificial Sequence:  Enzymatic Nucleic Acid
ugucgugcggaggaaacucccuucaaggacaucguccgggugugguuc

SEQ ID NO: 11021 - RNA, 48 nt, Artificial Sequence
  Description of Artificial Sequence:  Enzymatic Nucleic Acid
uugucgugggaggaaacucccuucaaggacaucguccgggcugugguu

SEQ ID NO: 11022 - RNA, 48 nt, Artificial Sequence
  Description of Artificial Sequence:  Enzymatic Nucleic Acid
augcuuguggaggaaacucccuucaaggacaucguccggggugccugu

SEQ ID NO: 11023 - RNA, 48 nt, Artificial Sequence
  Description of Artificial Sequence:  Enzymatic Nucleic Acid
uuucuaugggaggaaacucccuucaaggacaucguccggguugucgug

SEQ ID NO: 11024 - RNA, 48 nt, Artificial Sequence
  Description of Artificial Sequence:  Enzymatic Nucleic Acid
ggauguuuggaggaaacucccuucaaggacaucguccggguaugcuug

SEQ ID NO: 11025 - RNA, 48 nt, Artificial Sequence
  Description of Artificial Sequence:  Enzymatic Nucleic Acid
cgaugccuggaggaaacucccuucaaggacaucguccggggaugaaga

SEQ ID NO: 11026 - RNA, 48 nt, Artificial Sequence
  Description of Artificial Sequence:  Enzymatic Nucleic Acid
cucgaugcggaggaaacucccuucaaggacaucguccgggucgaugaa

SEQ ID NO: 11027 - RNA, 48 nt, Artificial Sequence
  Description of Artificial Sequence:  Enzymatic Nucleic Acid
ccucgaugggaggaaacucccuucaaggacaucguccgggcucgauga

SEQ ID NO: 11028 - RNA, 48 nt, Artificial Sequence
  Description of Artificial Sequence:  Enzymatic Nucleic Acid
auggaccuggaggaaacucccuucaaggacaucguccggggaugccuc

SEQ ID NO: 11029 - RNA, 48 nt, Artificial Sequence
  Description of Artificial Sequence:  Enzymatic Nucleic Acid
ggauggacggaggaaacucccuucaaggacaucguccgggucgaugcc

SEQ ID NO: 11030 - RNA, 48 nt, Artificial Sequence
  Description of Artificial Sequence:  Enzymatic Nucleic Acid
gggauggaggaggaaacucccuucaaggacaucguccgggcucgaugc

SEQ ID NO: 11031 - RNA, 48 nt, Artificial Sequence
  Description of Artificial Sequence:  Enzymatic Nucleic Acid
agggucucggaggaaacucccuucaaggacaucguccgggugauuuuu

SEQ ID NO: 11032 - RNA, 48 nt, Artificial Sequence
  Description of Artificial Sequence:  Enzymatic Nucleic Acid
cagggucuggaggaaacucccuucaaggacaucguccgggcugauuuu

SEQ ID NO: 11033 - RNA, 48 nt, Artificial Sequence
  Description of Artificial Sequence:  Enzymatic Nucleic Acid
gccaggguggaggaaacucccuucaaggacaucguccggguccugauu

SEQ ID NO: 11034 - RNA, 48 nt, Artificial Sequence
  Description of Artificial Sequence:  Enzymatic Nucleic Acid
augauagcggaggaaacucccuucaaggacaucguccgggagggucuc

SEQ ID NO: 11035 - RNA, 48 nt, Artificial Sequence
  Description of Artificial Sequence:  Enzymatic Nucleic Acid
uaugauagggaggaaacucccuucaaggacaucguccgggcagggucu

SEQ ID NO: 11036 - RNA, 48 nt, Artificial Sequence
  Description of Artificial Sequence:  Enzymatic Nucleic Acid
acuaagguggaggaaacucccuucaaggacaucguccggguaugauag

SEQ ID NO: 11037 - RNA, 48 nt, Artificial Sequence
  Description of Artificial Sequence:  Enzymatic Nucleic Acid
agcgaagaggaggaaacucccuucaaggacaucguccggguaaggucu

SEQ ID NO: 11038 - RNA, 48 nt, Artificial Sequence
  Description of Artificial Sequence:  Enzymatic Nucleic Acid
uauaccagggaggaaacucccuucaaggacaucguccggggaagacua

SEQ ID NO: 11039 - RNA, 48 nt, Artificial Sequence
  Description of Artificial Sequence:  Enzymatic Nucleic Acid
gaguauacggaggaaacucccuucaaggacaucguccgggagcgaaga

SEQ ID NO: 11040 - RNA, 48 nt, Artificial Sequence
  Description of Artificial Sequence:  Enzymatic Nucleic Acid
cgaguauaggaggaaacucccuucaaggacaucguccgggcagcgaag

SEQ ID NO: 11041 - RNA, 48 nt, Artificial Sequence
  Description of Artificial Sequence:  Enzymatic Nucleic Acid
acagacagggaggaaacucccuucaaggacaucguccggggaguauac

SEQ ID NO: 11042 - RNA, 48 nt, Artificial Sequence
  Description of Artificial Sequence:  Enzymatic Nucleic Acid
uugacagaggaggaaacucccuucaaggacaucguccgggagcgagua

SEQ ID NO: 11043 - RNA, 48 nt, Artificial Sequence
  Description of Artificial Sequence:  Enzymatic Nucleic Acid
cugguugaggaggaaacucccuucaaggacaucguccgggagacagcg

SEQ ID NO: 11044 - RNA, 48 nt, Artificial Sequence
  Description of Artificial Sequence:  Enzymatic Nucleic Acid
gucaaccgggaggaaacucccuucaaggacaucguccgggugguugac

SEQ ID NO: 11045 - RNA, 48 nt, Artificial Sequence
  Description of Artificial Sequence:  Enzymatic Nucleic Acid
aagucaacggaggaaacucccuucaaggacaucguccggggcugguug

SEQ ID NO: 11046 - RNA, 48 nt, Artificial Sequence
  Description of Artificial Sequence:  Enzymatic Nucleic Acid
aaagucaaggaggaaacucccuucaaggacaucguccgggcgcugguu

SEQ ID NO: 11047 - RNA, 48 nt, Artificial Sequence
  Description of Artificial Sequence:  Enzymatic Nucleic Acid
aaaaaaguggaggaaacucccuucaaggacaucguccgggaaccgcug

SEQ ID NO: 11048 - RNA, 48 nt, Artificial Sequence
  Description of Artificial Sequence:  Enzymatic Nucleic Acid
aaagaaggggaggaaacucccuucaaggacaucguccggguuaaaaaa

SEQ ID NO: 11049 - RNA, 48 nt, Artificial Sequence
  Description of Artificial Sequence:  Enzymatic Nucleic Acid
uccagaaaggaggaaacucccuucaaggacaucguccgggugguaaaa

SEQ ID NO: 11050 - RNA, 48 nt, Artificial Sequence
  Description of Artificial Sequence:  Enzymatic Nucleic Acid
auuugcucggaggaaacucccuucaaggacaucguccgggagaaacug

SEQ ID NO: 11051 - RNA, 48 nt, Artificial Sequence
  Description of Artificial Sequence:  Enzymatic Nucleic Acid
aauuugcuggaggaaacucccuucaaggacaucguccgggcagaaacu

SEQ ID NO: 11052 - RNA, 48 nt, Artificial Sequence
  Description of Artificial Sequence:  Enzymatic Nucleic Acid
ugaauuugggaggaaacucccuucaaggacaucguccggguccagaaa

SEQ ID NO: 11053 - RNA, 48 nt, Artificial Sequence
  Description of Artificial Sequence:  Enzymatic Nucleic Acid
aaggcaaaggaggaaacucccuucaaggacaucguccgggugaauuug

SEQ ID NO: 11054 - RNA, 48 nt, Artificial Sequence
  Description of Artificial Sequence:  Enzymatic Nucleic Acid
caggaaggggaggaaacucccuucaaggacaucguccgggaaacugaa

SEQ ID NO: 11055 - RNA, 48 nt, Artificial Sequence
  Description of Artificial Sequence:  Enzymatic Nucleic Acid
uacaaaucggaggaaacucccuucaaggacaucguccgggaggaaggc

SEQ ID NO: 11056 - RNA, 48 nt, Artificial Sequence
  Description of Artificial Sequence:  Enzymatic Nucleic Acid
uuacaaauggaggaaacucccuucaaggacaucguccgggcaggaagg

SEQ ID NO: 11057 - RNA, 48 nt, Artificial Sequence
  Description of Artificial Sequence:  Enzymatic Nucleic Acid
acaauuuaggaggaaacucccuucaaggacaucguccgggaaauccag

SEQ ID NO: 11058 - RNA, 48 nt, Artificial Sequence
  Description of Artificial Sequence:  Enzymatic Nucleic Acid
ggucauuaggaggaaacucccuucaaggacaucguccgggaauuuaca

SEQ ID NO: 11059 - RNA, 48 nt, Artificial Sequence
  Description of Artificial Sequence:  Enzymatic Nucleic Acid
uuugagguggaggaaacucccuucaaggacaucguccgggauuacaau

SEQ ID NO: 11060 - RNA, 48 nt, Artificial Sequence
  Description of Artificial Sequence:  Enzymatic Nucleic Acid
aagaacugggaggaaacucccuucaaggacaucguccggguaaaguuu

SEQ ID NO: 11061 - RNA, 48 nt, Artificial Sequence
  Description of Artificial Sequence:  Enzymatic Nucleic Acid
uggaagaaggaggaaacucccuucaaggacaucguccgggugcuaaag

SEQ ID NO: 11062 - RNA, 48 nt, Artificial Sequence
  Description of Artificial Sequence:  Enzymatic Nucleic Acid
accugaguggaggaaacucccuucaaggacaucguccgggagauggaa

SEQ ID NO: 11063 - RNA, 48 nt, Artificial Sequence
  Description of Artificial Sequence:  Enzymatic Nucleic Acid
aagcaaacggaggaaacucccuucaaggacaucguccgggugagucag

SEQ ID NO: 11064 - RNA, 48 nt, Artificial Sequence
  Description of Artificial Sequence:  Enzymatic Nucleic Acid
gaagcaaaggaggaaacucccuucaaggacaucguccgggcugaguca

SEQ ID NO: 11065 - RNA, 48 nt, Artificial Sequence
  Description of Artificial Sequence:  Enzymatic Nucleic Acid
cagagaagggaggaaacucccuucaaggacaucguccgggaaaccuga

SEQ ID NO: 11066 - RNA, 48 nt, Artificial Sequence
  Description of Artificial Sequence:  Enzymatic Nucleic Acid
aagaccgcggaggaaacucccuucaaggacaucguccgggagagaagc

SEQ ID NO: 11067 - RNA, 48 nt, Artificial Sequence
  Description of Artificial Sequence:  Enzymatic Nucleic Acid
gaagaccgggaggaaacucccuucaaggacaucguccgggcagagaag

SEQ ID NO: 11068 - RNA, 48 nt, Artificial Sequence
  Description of Artificial Sequence:  Enzymatic Nucleic Acid
cugaagacggaggaaacucccuucaaggacaucguccggggccagaga

SEQ ID NO: 11069 - RNA, 48 nt, Artificial Sequence
  Description of Artificial Sequence:  Enzymatic Nucleic Acid
ucugaagaggaggaaacucccuucaaggacaucguccgggcgccagag

SEQ ID NO: 11070 - RNA, 48 nt, Artificial Sequence
  Description of Artificial Sequence:  Enzymatic Nucleic Acid
uguugauuggaggaaacucccuucaaggacaucguccgggugaagacc

SEQ ID NO: 11071 - RNA, 48 nt, Artificial Sequence
  Description of Artificial Sequence:  Enzymatic Nucleic Acid
gauaaucaggaggaaacucccuucaaggacaucguccgggggaagugu

SEQ ID NO: 11072 - RNA, 48 nt, Artificial Sequence
  Description of Artificial Sequence:  Enzymatic Nucleic Acid
cagauaauggaggaaacucccuucaaggacaucguccgggacggaagu

SEQ ID NO: 11073 - RNA, 48 nt, Artificial Sequence
  Description of Artificial Sequence:  Enzymatic Nucleic Acid
aaugcacgggaggaaacucccuucaaggacaucguccgggagauaauc

SEQ ID NO: 11074 - RNA, 48 nt, Artificial Sequence
  Description of Artificial Sequence:  Enzymatic Nucleic Acid
aaaaugcaggaggaaacucccuucaaggacaucguccggggcagauaa

SEQ ID NO: 11075 - RNA, 48 nt, Artificial Sequence
  Description of Artificial Sequence:  Enzymatic Nucleic Acid
ccaaaaugggaggaaacucccuucaaggacaucguccgggacgcagau

SEQ ID NO: 11076 - RNA, 48 nt, Artificial Sequence
  Description of Artificial Sequence:  Enzymatic Nucleic Acid
gcuuugucggaggaaacucccuucaaggacaucguccgggaaaaugca

SEQ ID NO: 11077 - RNA, 48 nt, Artificial Sequence
  Description of Artificial Sequence:  Enzymatic Nucleic Acid
agcuuuguggaggaaacucccuucaaggacaucguccgggcaaaaugc

SEQ ID NO: 11078 - RNA, 48 nt, Artificial Sequence
  Description of Artificial Sequence:  Enzymatic Nucleic Acid
guuggaagggaggaaacucccuucaaggacaucguccggguuugucca

SEQ ID NO: 11079 - RNA, 48 nt, Artificial Sequence
  Description of Artificial Sequence:  Enzymatic Nucleic Acid
cccguaucggaggaaacucccuucaaggacaucguccgggugguugga

SEQ ID NO: 11080 - RNA, 48 nt, Artificial Sequence
  Description of Artificial Sequence:  Enzymatic Nucleic Acid
ucccguauggaggaaacucccuucaaggacaucguccgggcugguugg

SEQ ID NO: 11081 - RNA, 48 nt, Artificial Sequence
  Description of Artificial Sequence:  Enzymatic Nucleic Acid
cuucuuccggaggaaacucccuucaaggacaucguccgggguauccug

SEQ ID NO: 11082 - RNA, 48 nt, Artificial Sequence
  Description of Artificial Sequence:  Enzymatic Nucleic Acid
ucuucuucggaggaaacucccuucaaggacaucguccgggcguauccu

SEQ ID NO: 11083 - RNA, 48 nt, Artificial Sequence
  Description of Artificial Sequence:  Enzymatic Nucleic Acid
uucuucuuggaggaaacucccuucaaggacaucguccgggccguaucc

SEQ ID NO: 11084 - RNA, 48 nt, Artificial Sequence
  Description of Artificial Sequence:  Enzymatic Nucleic Acid
cauuucuuggaggaaacucccuucaaggacaucguccggguucccgua

SEQ ID NO: 11085 - RNA, 48 nt, Artificial Sequence
  Description of Artificial Sequence:  Enzymatic Nucleic Acid
agccauuuggaggaaacucccuucaaggacaucguccggguucuuccc

SEQ ID NO: 11086 - RNA, 48 nt, Artificial Sequence
  Description of Artificial Sequence:  Enzymatic Nucleic Acid
ucaccagcggaggaaacucccuucaaggacaucguccgggauuucuuc

SEQ ID NO: 11087 - RNA, 48 nt, Artificial Sequence
  Description of Artificial Sequence:  Enzymatic Nucleic Acid
aucaccagggaggaaacucccuucaaggacaucguccgggcauuucuu

SEQ ID NO: 11088 - RNA, 48 nt, Artificial Sequence
  Description of Artificial Sequence:  Enzymatic Nucleic Acid
aagaucacggaggaaacucccuucaaggacaucguccgggagccauuu

SEQ ID NO: 11089 - RNA, 48 nt, Artificial Sequence
  Description of Artificial Sequence:  Enzymatic Nucleic Acid
aaagaucaggaggaaacucccuucaaggacaucguccgggcagccauu

SEQ ID NO: 11090 - RNA, 48 nt, Artificial Sequence
  Description of Artificial Sequence:  Enzymatic Nucleic Acid
ugaaagauggaggaaacucccuucaaggacaucguccgggaccagcca

SEQ ID NO: 11091 - RNA, 48 nt, Artificial Sequence
  Description of Artificial Sequence:  Enzymatic Nucleic Acid
gaaaccugggaggaaacucccuucaaggacaucguccgggugaaagau

SEQ ID NO: 11092 - RNA, 48 nt, Artificial Sequence
  Description of Artificial Sequence:  Enzymatic Nucleic Acid
gaagaaacggaggaaacucccuucaaggacaucguccgggugcugaaa

SEQ ID NO: 11093 - RNA, 48 nt, Artificial Sequence
  Description of Artificial Sequence:  Enzymatic Nucleic Acid
ugaagaaaggaggaaacucccuucaaggacaucguccgggcugcugaa

SEQ ID NO: 11094 - RNA, 48 nt, Artificial Sequence
  Description of Artificial Sequence:  Enzymatic Nucleic Acid
aguuccucggaggaaacucccuucaaggacaucguccgggaugaagaa

SEQ ID NO: 11095 - RNA, 48 nt, Artificial Sequence
  Description of Artificial Sequence:  Enzymatic Nucleic Acid
aaguuccuggaggaaacucccuucaaggacaucguccgggcaugaaga

SEQ ID NO: 11096 - RNA, 48 nt, Artificial Sequence
  Description of Artificial Sequence:  Enzymatic Nucleic Acid
uuaaguucggaggaaacucccuucaaggacaucguccggguccaugaa

SEQ ID NO: 11097 - RNA, 48 nt, Artificial Sequence
  Description of Artificial Sequence:  Enzymatic Nucleic Acid
auuaaguuggaggaaacucccuucaaggacaucguccgggcuccauga

SEQ ID NO: 11098 - RNA, 48 nt, Artificial Sequence
  Description of Artificial Sequence:  Enzymatic Nucleic Acid
gcuucugaggaggaaacucccuucaaggacaucguccggggguaugua

SEQ ID NO: 11099 - RNA, 48 nt, Artificial Sequence
  Description of Artificial Sequence:  Enzymatic Nucleic Acid
cccugcuuggaggaaacucccuucaaggacaucguccgggugacggua

SEQ ID NO: 11100 - RNA, 48 nt, Artificial Sequence
  Description of Artificial Sequence:  Enzymatic Nucleic Acid
acucccugggaggaaacucccuucaaggacaucguccggguucugacg

SEQ ID NO: 11101 - RNA, 48 nt, Artificial Sequence
  Description of Artificial Sequence:  Enzymatic Nucleic Acid
acuacuccggaggaaacucccuucaaggacaucguccgggugcuucug

SEQ ID NO: 11102 - RNA, 48 nt, Artificial Sequence
  Description of Artificial Sequence:  Enzymatic Nucleic Acid
uacuacucggaggaaacucccuucaaggacaucguccgggcugcuucu

SEQ ID NO: 11103 - RNA, 48 nt, Artificial Sequence
  Description of Artificial Sequence:  Enzymatic Nucleic Acid
guacuacuggaggaaacucccuucaaggacaucguccgggccugcuuc

SEQ ID NO: 11104 - RNA, 48 nt, Artificial Sequence
  Description of Artificial Sequence:  Enzymatic Nucleic Acid
aaguacuaggaggaaacucccuucaaggacaucguccgggucccugcu

SEQ ID NO: 11105 - RNA, 48 nt, Artificial Sequence
  Description of Artificial Sequence:  Enzymatic Nucleic Acid
uuuaaguaggaggaaacucccuucaaggacaucguccggguacucccu

SEQ ID NO: 11106 - RNA, 48 nt, Artificial Sequence
  Description of Artificial Sequence:  Enzymatic Nucleic Acid
aggcaguuggaggaaacucccuucaaggacaucguccggguugauauu

SEQ ID NO: 11107 - RNA, 48 nt, Artificial Sequence
  Description of Artificial Sequence:  Enzymatic Nucleic Acid
gaauuaggggaggaaacucccuucaaggacaucguccgggaguucuug

SEQ ID NO: 11108 - RNA, 48 nt, Artificial Sequence
  Description of Artificial Sequence:  Enzymatic Nucleic Acid
uggaggucggaggaaacucccuucaaggacaucguccgggugaauuag

SEQ ID NO: 11109 - RNA, 48 nt, Artificial Sequence
  Description of Artificial Sequence:  Enzymatic Nucleic Acid
guggagguggaggaaacucccuucaaggacaucguccgggcugaauua

SEQ ID NO: 11110 - RNA, 48 nt, Artificial Sequence
  Description of Artificial Sequence:  Enzymatic Nucleic Acid
ccuccuauggaggaaacucccuucaaggacaucguccgggauguggag

SEQ ID NO: 11111 - RNA, 48 nt, Artificial Sequence
  Description of Artificial Sequence:  Enzymatic Nucleic Acid
uaaaccucggaggaaacucccuucaaggacaucguccggguaucaugu

SEQ ID NO: 11112 - RNA, 48 nt, Artificial Sequence
  Description of Artificial Sequence:  Enzymatic Nucleic Acid
guaaaccuggaggaaacucccuucaaggacaucguccgggcuaucaug

SEQ ID NO: 11113 - RNA, 48 nt, Artificial Sequence
  Description of Artificial Sequence:  Enzymatic Nucleic Acid
auguaaacggaggaaacucccuucaaggacaucguccggguccuauca

SEQ ID NO: 11114 - RNA, 48 nt, Artificial Sequence
  Description of Artificial Sequence:  Enzymatic Nucleic Acid
aauguaaaggaggaaacucccuucaaggacaucguccgggcuccuauc

SEQ ID NO: 11115 - RNA, 48 nt, Artificial Sequence
  Description of Artificial Sequence:  Enzymatic Nucleic Acid
uauuauaaggaggaaacucccuucaaggacaucguccggguugaaaug

SEQ ID NO: 11116 - RNA, 48 nt, Artificial Sequence
  Description of Artificial Sequence:  Enzymatic Nucleic Acid
ucuuccauggaggaaacucccuucaaggacaucguccggguauuauaa

SEQ ID NO: 11117 - RNA, 48 nt, Artificial Sequence
  Description of Artificial Sequence:  Enzymatic Nucleic Acid
uucucuucggaggaaacucccuucaaggacaucguccgggaucuauua

SEQ ID NO: 11118 - RNA, 48 nt, Artificial Sequence
  Description of Artificial Sequence:  Enzymatic Nucleic Acid
auucucuuggaggaaacucccuucaaggacaucguccgggcaucuauu

SEQ ID NO: 11119 - RNA, 48 nt, Artificial Sequence
  Description of Artificial Sequence:  Enzymatic Nucleic Acid
gaaauucuggaggaaacucccuucaaggacaucguccggguuccaucu

SEQ ID NO: 11120 - RNA, 48 nt, Artificial Sequence
  Description of Artificial Sequence:  Enzymatic Nucleic Acid
uggaaauuggaggaaacucccuucaaggacaucguccgggucuuccau

SEQ ID NO: 11121 - RNA, 48 nt, Artificial Sequence
  Description of Artificial Sequence:  Enzymatic Nucleic Acid
uucaccuuggaggaaacucccuucaaggacaucguccggguggaaauu

SEQ ID NO: 11122 - RNA, 48 nt, Artificial Sequence
  Description of Artificial Sequence:  Enzymatic Nucleic Acid
accuucacggaggaaacucccuucaaggacaucguccggguucuggaa

SEQ ID NO: 11123 - RNA, 48 nt, Artificial Sequence
  Description of Artificial Sequence:  Enzymatic Nucleic Acid
uaccuucaggaggaaacucccuucaaggacaucguccgggcuucugga

SEQ ID NO: 11124 - RNA, 48 nt, Artificial Sequence
  Description of Artificial Sequence:  Enzymatic Nucleic Acid
ucuaccuuggaggaaacucccuucaaggacaucguccgggaccuucug

SEQ ID NO: 11125 - RNA, 48 nt, Artificial Sequence
  Description of Artificial Sequence:  Enzymatic Nucleic Acid
ugaucuacggaggaaacucccuucaaggacaucguccggguucaccuu

SEQ ID NO: 11126 - RNA, 48 nt, Artificial Sequence
  Description of Artificial Sequence:  Enzymatic Nucleic Acid
uugaucuaggaggaaacucccuucaaggacaucguccgggcuucaccu

SEQ ID NO: 11127 - RNA, 48 nt, Artificial Sequence
  Description of Artificial Sequence:  Enzymatic Nucleic Acid
ucuuugauggaggaaacucccuucaaggacaucguccggguaccuuca

SEQ ID NO: 11128 - RNA, 48 nt, Artificial Sequence
  Description of Artificial Sequence:  Enzymatic Nucleic Acid
gcuuccuuggaggaaacucccuucaaggacaucguccggguuugaucu

SEQ ID NO: 11129 - RNA, 48 nt, Artificial Sequence
  Description of Artificial Sequence:  Enzymatic Nucleic Acid
uuugcuucggaggaaacucccuucaaggacaucguccggguucuuuga

SEQ ID NO: 11130 - RNA, 48 nt, Artificial Sequence
  Description of Artificial Sequence:  Enzymatic Nucleic Acid
uuuugcuuggaggaaacucccuucaaggacaucguccgggcuucuuug

SEQ ID NO: 11131 - RNA, 48 nt, Artificial Sequence
  Description of Artificial Sequence:  Enzymatic Nucleic Acid
auuuuuugggaggaaacucccuucaaggacaucguccggguuccuucu

SEQ ID NO: 11132 - RNA, 48 nt, Artificial Sequence
  Description of Artificial Sequence:  Enzymatic Nucleic Acid
ggcugcggggaggaaacucccuucaaggacaucguccgggauuuuuug

SEQ ID NO: 11133 - RNA, 48 nt, Artificial Sequence
  Description of Artificial Sequence:  Enzymatic Nucleic Acid
uuuggcugggaggaaacucccuucaaggacaucguccgggggcauuuu

SEQ ID NO: 11134 - RNA, 48 nt, Artificial Sequence
  Description of Artificial Sequence:  Enzymatic Nucleic Acid
uaauuuggggaggaaacucccuucaaggacaucguccgggugcggcau

SEQ ID NO: 11135 - RNA, 48 nt, Artificial Sequence
  Description of Artificial Sequence:  Enzymatic Nucleic Acid
cucaacagggaggaaacucccuucaaggacaucguccggguaauuugg

SEQ ID NO: 11136 - RNA, 48 nt, Artificial Sequence
  Description of Artificial Sequence:  Enzymatic Nucleic Acid
uaucucaaggaggaaacucccuucaaggacaucguccgggagcuaauu

SEQ ID NO: 11137 - RNA, 48 nt, Artificial Sequence
  Description of Artificial Sequence:  Enzymatic Nucleic Acid
aaguaucuggaggaaacucccuucaaggacaucguccgggaacagcua

SEQ ID NO: 11138 - RNA, 48 nt, Artificial Sequence
  Description of Artificial Sequence:  Enzymatic Nucleic Acid
uuaaguauggaggaaacucccuucaaggacaucguccgggucaacagc

SEQ ID NO: 11139 - RNA, 48 nt, Artificial Sequence
  Description of Artificial Sequence:  Enzymatic Nucleic Acid
uucuuuucggaggaaacucccuucaaggacaucguccggguuauuaag

SEQ ID NO: 11140 - RNA, 48 nt, Artificial Sequence
  Description of Artificial Sequence:  Enzymatic Nucleic Acid
cuucuuuuggaggaaacucccuucaaggacaucguccgggcuuauuaa

SEQ ID NO: 11141 - RNA, 48 nt, Artificial Sequence
  Description of Artificial Sequence:  Enzymatic Nucleic Acid
acugccuuggaggaaacucccuucaaggacaucguccggguuuuccuu

SEQ ID NO: 11142 - RNA, 48 nt, Artificial Sequence
  Description of Artificial Sequence:  Enzymatic Nucleic Acid
cuaacugcggaggaaacucccuucaaggacaucguccggguucuuuuc

SEQ ID NO: 11143 - RNA, 48 nt, Artificial Sequence
  Description of Artificial Sequence:  Enzymatic Nucleic Acid
acuaacugggaggaaacucccuucaaggacaucguccgggcuucuuuu

SEQ ID NO: 11144 - RNA, 48 nt, Artificial Sequence
  Description of Artificial Sequence:  Enzymatic Nucleic Acid
aggacuaaggaggaaacucccuucaaggacaucguccgggugccuucu

SEQ ID NO: 11145 - RNA, 48 nt, Artificial Sequence
  Description of Artificial Sequence:  Enzymatic Nucleic Acid
auaaaggaggaggaaacucccuucaaggacaucguccggguaacugcc

SEQ ID NO: 11146 - RNA, 48 nt, Artificial Sequence
  Description of Artificial Sequence:  Enzymatic Nucleic Acid
guuguuguggaggaaacucccuucaaggacaucguccgggaauaauaa

SEQ ID NO: 11147 - RNA, 48 nt, Artificial Sequence
  Description of Artificial Sequence:  Enzymatic Nucleic Acid
gaagaauuggaggaaacucccuucaaggacaucguccgggguuguugu

SEQ ID NO: 11148 - RNA, 48 nt, Artificial Sequence
  Description of Artificial Sequence:  Enzymatic Nucleic Acid
uaauccuuggaggaaacucccuucaaggacaucguccgggugaagaau

SEQ ID NO: 11149 - RNA, 48 nt, Artificial Sequence
  Description of Artificial Sequence:  Enzymatic Nucleic Acid
ggauaaucggaggaaacucccuucaaggacaucguccggguucugaag

SEQ ID NO: 11150 - RNA, 48 nt, Artificial Sequence
  Description of Artificial Sequence:  Enzymatic Nucleic Acid
uggauaauggaggaaacucccuucaaggacaucguccgggcuucugaa

SEQ ID NO: 11151 - RNA, 48 nt, Artificial Sequence
  Description of Artificial Sequence:  Enzymatic Nucleic Acid
uaauucccggaggaaacucccuucaaggacaucguccgggauggauaa

SEQ ID NO: 11152 - RNA, 48 nt, Artificial Sequence
  Description of Artificial Sequence:  Enzymatic Nucleic Acid
guaauuccggaggaaacucccuucaaggacaucguccgggcauggaua

SEQ ID NO: 11153 - RNA, 48 nt, Artificial Sequence
  Description of Artificial Sequence:  Enzymatic Nucleic Acid
uguaauucggaggaaacucccuucaaggacaucguccgggccauggau

SEQ ID NO: 11154 - RNA, 48 nt, Artificial Sequence
  Description of Artificial Sequence:  Enzymatic Nucleic Acid
auguaauuggaggaaacucccuucaaggacaucguccgggcccaugga

SEQ ID NO: 11155 - RNA, 48 nt, Artificial Sequence
  Description of Artificial Sequence:  Enzymatic Nucleic Acid
gauaaggcggaggaaacucccuucaaggacaucguccggguauguaau

SEQ ID NO: 11156 - RNA, 48 nt, Artificial Sequence
  Description of Artificial Sequence:  Enzymatic Nucleic Acid
ugauaaggggaggaaacucccuucaaggacaucguccgggcuauguaa

SEQ ID NO: 11157 - RNA, 48 nt, Artificial Sequence
  Description of Artificial Sequence:  Enzymatic Nucleic Acid
gggcaauuggaggaaacucccuucaaggacaucguccggguauugaua

SEQ ID NO: 11158 - RNA, 48 nt, Artificial Sequence
  Description of Artificial Sequence:  Enzymatic Nucleic Acid
cuucugggggaggaaacucccuucaaggacaucguccgggaauucuau

SEQ ID NO: 11159 - RNA, 48 nt, Artificial Sequence
  Description of Artificial Sequence:  Enzymatic Nucleic Acid
cuuuucuuggaggaaacucccuucaaggacaucguccgggugggcaau

SEQ ID NO: 11160 - RNA, 48 nt, Artificial Sequence
  Description of Artificial Sequence:  Enzymatic Nucleic Acid
agucuuuuggaggaaacucccuucaaggacaucguccggguucugggc

SEQ ID NO: 11161 - RNA, 48 nt, Artificial Sequence
  Description of Artificial Sequence:  Enzymatic Nucleic Acid
caguuaguggaggaaacucccuucaaggacaucguccggguuuucuuc

SEQ ID NO: 11162 - RNA, 48 nt, Artificial Sequence
  Description of Artificial Sequence:  Enzymatic Nucleic Acid
auaauuuaggaggaaacucccuucaaggacaucguccgggaguuaguc

SEQ ID NO: 11163 - RNA, 48 nt, Artificial Sequence
  Description of Artificial Sequence:  Enzymatic Nucleic Acid
acacuguuggaggaaacucccuucaaggacaucguccgggauaauuua

SEQ ID NO: 11164 - RNA, 48 nt, Artificial Sequence
  Description of Artificial Sequence:  Enzymatic Nucleic Acid
gaugcacaggaggaaacucccuucaaggacaucguccggguguucaua

SEQ ID NO: 11165 - RNA, 48 nt, Artificial Sequence
  Description of Artificial Sequence:  Enzymatic Nucleic Acid
ccgaugcaggaggaaacucccuucaaggacaucguccgggacuguuca

SEQ ID NO: 11166 - RNA, 48 nt, Artificial Sequence
  Description of Artificial Sequence:  Enzymatic Nucleic Acid
ccccgaugggaggaaacucccuucaaggacaucguccgggacacuguu

SEQ ID NO: 11167 - RNA, 48 nt, Artificial Sequence
  Description of Artificial Sequence:  Enzymatic Nucleic Acid
ugcaccccggaggaaacucccuucaaggacaucguccggggaugcaca

SEQ ID NO: 11168 - RNA, 48 nt, Artificial Sequence
  Description of Artificial Sequence:  Enzymatic Nucleic Acid
augcacccggaggaaacucccuucaaggacaucguccgggcgaugcac

SEQ ID NO: 11169 - RNA, 48 nt, Artificial Sequence
  Description of Artificial Sequence:  Enzymatic Nucleic Acid
caugcaccggaggaaacucccuucaaggacaucguccgggccgaugca

SEQ ID NO: 11170 - RNA, 48 nt, Artificial Sequence
  Description of Artificial Sequence:  Enzymatic Nucleic Acid
ccaugcacggaggaaacucccuucaaggacaucguccgggcccgaugc

SEQ ID NO: 11171 - RNA, 48 nt, Artificial Sequence
  Description of Artificial Sequence:  Enzymatic Nucleic Acid
cccaugcaggaggaaacucccuucaaggacaucguccgggccccgaug

SEQ ID NO: 11172 - RNA, 48 nt, Artificial Sequence
  Description of Artificial Sequence:  Enzymatic Nucleic Acid
ggcccaugggaggaaacucccuucaaggacaucguccgggacccccga

SEQ ID NO: 11173 - RNA, 48 nt, Artificial Sequence
  Description of Artificial Sequence:  Enzymatic Nucleic Acid
uucuggccggaggaaacucccuucaaggacaucguccgggaugcaccc

SEQ ID NO: 11174 - RNA, 48 nt, Artificial Sequence
  Description of Artificial Sequence:  Enzymatic Nucleic Acid
cuucuggcggaggaaacucccuucaaggacaucguccgggcaugcacc

SEQ ID NO: 11175 - RNA, 48 nt, Artificial Sequence
  Description of Artificial Sequence:  Enzymatic Nucleic Acid
ccuucuggggaggaaacucccuucaaggacaucguccgggccaugcac

SEQ ID NO: 11176 - RNA, 48 nt, Artificial Sequence
  Description of Artificial Sequence:  Enzymatic Nucleic Acid
aaauccuuggaggaaacucccuucaaggacaucguccggguggcccau

SEQ ID NO: 11177 - RNA, 48 nt, Artificial Sequence
  Description of Artificial Sequence:  Enzymatic Nucleic Acid
augaaaucggaggaaacucccuucaaggacaucguccggguucuggcc

SEQ ID NO: 11178 - RNA, 48 nt, Artificial Sequence
  Description of Artificial Sequence:  Enzymatic Nucleic Acid
aaugaaauggaggaaacucccuucaaggacaucguccgggcuucuggc

SEQ ID NO: 11179 - RNA, 48 nt, Artificial Sequence
  Description of Artificial Sequence:  Enzymatic Nucleic Acid
ccauuuugggaggaaacucccuucaaggacaucguccgggauuuauaa

SEQ ID NO: 11180 - RNA, 48 nt, Artificial Sequence
  Description of Artificial Sequence:  Enzymatic Nucleic Acid
uucuguccggaggaaacucccuucaaggacaucguccgggauuuugca

SEQ ID NO: 11181 - RNA, 48 nt, Artificial Sequence
  Description of Artificial Sequence:  Enzymatic Nucleic Acid
uuucugucggaggaaacucccuucaaggacaucguccgggcauuuugc

SEQ ID NO: 11182 - RNA, 48 nt, Artificial Sequence
  Description of Artificial Sequence:  Enzymatic Nucleic Acid
cuuucuguggaggaaacucccuucaaggacaucguccgggccauuuug

SEQ ID NO: 11183 - RNA, 48 nt, Artificial Sequence
  Description of Artificial Sequence:  Enzymatic Nucleic Acid
uauucuuuggaggaaacucccuucaaggacaucguccgggugucccau

SEQ ID NO: 11184 - RNA, 48 nt, Artificial Sequence
  Description of Artificial Sequence:  Enzymatic Nucleic Acid
acuauauuggaggaaacucccuucaaggacaucguccggguuucuguc

SEQ ID NO: 11185 - RNA, 48 nt, Artificial Sequence
  Description of Artificial Sequence:  Enzymatic Nucleic Acid
uaccaauaggaggaaacucccuucaaggacaucguccggguauauucu

SEQ ID NO: 11186 - RNA, 48 nt, Artificial Sequence
  Description of Artificial Sequence:  Enzymatic Nucleic Acid
accuguacggaggaaacucccuucaaggacaucguccgggaauacuau

SEQ ID NO: 11187 - RNA, 48 nt, Artificial Sequence
  Description of Artificial Sequence:  Enzymatic Nucleic Acid
aaccuguaggaggaaacucccuucaaggacaucguccgggcaauacua

SEQ ID NO: 11188 - RNA, 48 nt, Artificial Sequence
  Description of Artificial Sequence:  Enzymatic Nucleic Acid
aguagaacggaggaaacucccuucaaggacaucguccggguguaccaa

SEQ ID NO: 11189 - RNA, 48 nt, Artificial Sequence
  Description of Artificial Sequence:  Enzymatic Nucleic Acid
uaguagaaggaggaaacucccuucaaggacaucguccgggcuguacca

SEQ ID NO: 11190 - RNA, 48 nt, Artificial Sequence
  Description of Artificial Sequence:  Enzymatic Nucleic Acid
uuugcuucggaggaaacucccuucaaggacaucguccggguguuuagu

SEQ ID NO: 11191 - RNA, 48 nt, Artificial Sequence
  Description of Artificial Sequence:  Enzymatic Nucleic Acid
uuuugcuuggaggaaacucccuucaaggacaucguccgggcuguuuag

SEQ ID NO: 11192 - RNA, 48 nt, Artificial Sequence
  Description of Artificial Sequence:  Enzymatic Nucleic Acid
uuguuuugggaggaaacucccuucaaggacaucguccggguuccuguu

SEQ ID NO: 11193 - RNA, 48 nt, Artificial Sequence
  Description of Artificial Sequence:  Enzymatic Nucleic Acid
uuagcggcggaggaaacucccuucaaggacaucguccgggaauuguuu

SEQ ID NO: 11194 - RNA, 48 nt, Artificial Sequence
  Description of Artificial Sequence:  Enzymatic Nucleic Acid
uuuagcggggaggaaacucccuucaaggacaucguccgggcaauuguu

SEQ ID NO: 11195 - RNA, 48 nt, Artificial Sequence
  Description of Artificial Sequence:  Enzymatic Nucleic Acid
aaguuuagggaggaaacucccuucaaggacaucguccgggggccaauu

SEQ ID NO: 11196 - RNA, 48 nt, Artificial Sequence
  Description of Artificial Sequence:  Enzymatic Nucleic Acid
aagauaugggaggaaacucccuucaaggacaucguccgggaaguuuag

SEQ ID NO: 11197 - RNA, 48 nt, Artificial Sequence
  Description of Artificial Sequence:  Enzymatic Nucleic Acid
gauaauauggaggaaacucccuucaaggacaucguccgggugaagaua

SEQ ID NO: 11198 - RNA, 48 nt, Artificial Sequence
  Description of Artificial Sequence:  Enzymatic Nucleic Acid
gguuucuuggaggaaacucccuucaaggacaucguccgggugauaaua

SEQ ID NO: 11199 - RNA, 48 nt, Artificial Sequence
  Description of Artificial Sequence:  Enzymatic Nucleic Acid
ugagguuuggaggaaacucccuucaaggacaucguccggguucugaua

SEQ ID NO: 11200 - RNA, 48 nt, Artificial Sequence
  Description of Artificial Sequence:  Enzymatic Nucleic Acid
agauuucaggaggaaacucccuucaaggacaucguccgggugagguuu

SEQ ID NO: 11201 - RNA, 48 nt, Artificial Sequence
  Description of Artificial Sequence:  Enzymatic Nucleic Acid
ucagauuuggaggaaacucccuucaaggacaucguccgggacugaggu

SEQ ID NO: 11202 - RNA, 48 nt, Artificial Sequence
  Description of Artificial Sequence:  Enzymatic Nucleic Acid
cagguaguggaggaaacucccuucaaggacaucguccgggagauuuca

SEQ ID NO: 11203 - RNA, 48 nt, Artificial Sequence
  Description of Artificial Sequence:  Enzymatic Nucleic Acid
ccagaggaggaggaaacucccuucaaggacaucguccgggagguaguc

SEQ ID NO: 11204 - RNA, 48 nt, Artificial Sequence
  Description of Artificial Sequence:  Enzymatic Nucleic Acid
aaaagaacggaggaaacucccuucaaggacaucguccgggagaggaca

SEQ ID NO: 11205 - RNA, 48 nt, Artificial Sequence
  Description of Artificial Sequence:  Enzymatic Nucleic Acid
caaaagaaggaggaaacucccuucaaggacaucguccgggcagaggac

SEQ ID NO: 11206 - RNA, 48 nt, Artificial Sequence
  Description of Artificial Sequence:  Enzymatic Nucleic Acid
cguaguagggaggaaacucccuucaaggacaucguccgggaaaagaac

SEQ ID NO: 11207 - RNA, 48 nt, Artificial Sequence
  Description of Artificial Sequence:  Enzymatic Nucleic Acid
gacucacaggaggaaacucccuucaaggacaucguccgggguaguagc

SEQ ID NO: 11208 - RNA, 48 nt, Artificial Sequence
  Description of Artificial Sequence:  Enzymatic Nucleic Acid
gggacucaggaggaaacucccuucaaggacaucguccgggacguagua

SEQ ID NO: 11209 - RNA, 48 nt, Artificial Sequence
  Description of Artificial Sequence:  Enzymatic Nucleic Acid
uugggacuggaggaaacucccuucaaggacaucguccgggacacguag

SEQ ID NO: 11210 - RNA, 48 nt, Artificial Sequence
  Description of Artificial Sequence:  Enzymatic Nucleic Acid
cuuugggaggaggaaacucccuucaaggacaucguccgggucacacgu

SEQ ID NO: 11211 - RNA, 48 nt, Artificial Sequence
  Description of Artificial Sequence:  Enzymatic Nucleic Acid
aagaguugggaggaaacucccuucaaggacaucguccggguuugggac

SEQ ID NO: 11212 - RNA, 48 nt, Artificial Sequence
  Description of Artificial Sequence:  Enzymatic Nucleic Acid
gcuggucaggaggaaacucccuucaaggacaucguccggguaaagagu

SEQ ID NO: 11213 - RNA, 48 nt, Artificial Sequence
  Description of Artificial Sequence:  Enzymatic Nucleic Acid
gugcugguggaggaaacucccuucaaggacaucguccgggacuaaaga

SEQ ID NO: 11214 - RNA, 48 nt, Artificial Sequence
  Description of Artificial Sequence:  Enzymatic Nucleic Acid
cgagugugggaggaaacucccuucaaggacaucguccggguggucacu

SEQ ID NO: 11215 - RNA, 48 nt, Artificial Sequence
  Description of Artificial Sequence:  Enzymatic Nucleic Acid
uucagaagggaggaaacucccuucaaggacaucguccggggagugugc

SEQ ID NO: 11216 - RNA, 48 nt, Artificial Sequence
  Description of Artificial Sequence:  Enzymatic Nucleic Acid
ugaugauuggaggaaacucccuucaaggacaucguccgggagaagcga

SEQ ID NO: 11217 - RNA, 48 nt, Artificial Sequence
  Description of Artificial Sequence:  Enzymatic Nucleic Acid
gucaccuuggaggaaacucccuucaaggacaucguccgggagaugaug

SEQ ID NO: 11218 - RNA, 48 nt, Artificial Sequence
  Description of Artificial Sequence:  Enzymatic Nucleic Acid
gaagucacggaggaaacucccuucaaggacaucguccggguucagaug

SEQ ID NO: 11219 - RNA, 48 nt, Artificial Sequence
  Description of Artificial Sequence:  Enzymatic Nucleic Acid
agaagucaggaggaaacucccuucaaggacaucguccgggcuucagau

SEQ ID NO: 11220 - RNA, 48 nt, Artificial Sequence
  Description of Artificial Sequence:  Enzymatic Nucleic Acid
ugagaaguggaggaaacucccuucaaggacaucguccgggaccuucag

SEQ ID NO: 11221 - RNA, 48 nt, Artificial Sequence
  Description of Artificial Sequence:  Enzymatic Nucleic Acid
uguaucugggaggaaacucccuucaaggacaucguccgggugagaagu

SEQ ID NO: 11222 - RNA, 48 nt, Artificial Sequence
  Description of Artificial Sequence:  Enzymatic Nucleic Acid
ugauguauggaggaaacucccuucaaggacaucguccgggugcugaga

SEQ ID NO: 11223 - RNA, 48 nt, Artificial Sequence
  Description of Artificial Sequence:  Enzymatic Nucleic Acid
auuuaucuggaggaaacucccuucaaggacaucguccgggugauguau

SEQ ID NO: 11224 - RNA, 48 nt, Artificial Sequence
  Description of Artificial Sequence:  Enzymatic Nucleic Acid
gaauuuauggaggaaacucccuucaaggacaucguccgggucugaugu

SEQ ID NO: 11225 - RNA, 48 nt, Artificial Sequence
  Description of Artificial Sequence:  Enzymatic Nucleic Acid
aacugucaggaggaaacucccuucaaggacaucguccggguguuagaa

SEQ ID NO: 11226 - RNA, 48 nt, Artificial Sequence
  Description of Artificial Sequence:  Enzymatic Nucleic Acid
uaaacuguggaggaaacucccuucaaggacaucguccgggacuguuag

SEQ ID NO: 11227 - RNA, 48 nt, Artificial Sequence
  Description of Artificial Sequence:  Enzymatic Nucleic Acid
uguuuaaaggaggaaacucccuucaaggacaucguccgggugucacug

SEQ ID NO: 11228 - RNA, 48 nt, Artificial Sequence
  Description of Artificial Sequence:  Enzymatic Nucleic Acid
acgaagaaggaggaaacucccuucaaggacaucguccggguguuuaaa

SEQ ID NO: 11229 - RNA, 48 nt, Artificial Sequence
  Description of Artificial Sequence:  Enzymatic Nucleic Acid
auaagcaaggaggaaacucccuucaaggacaucguccggggaagaacu

SEQ ID NO: 11230 - RNA, 48 nt, Artificial Sequence
  Description of Artificial Sequence:  Enzymatic Nucleic Acid
uucauaagggaggaaacucccuucaaggacaucguccgggaacgaaga

SEQ ID NO: 11231 - RNA, 48 nt, Artificial Sequence
  Description of Artificial Sequence:  Enzymatic Nucleic Acid
agaccauuggaggaaacucccuucaaggacaucguccgggauaagcaa

SEQ ID NO: 11232 - RNA, 48 nt, Artificial Sequence
  Description of Artificial Sequence:  Enzymatic Nucleic Acid
ucugagacggaggaaacucccuucaaggacaucguccgggauucauaa

SEQ ID NO: 11233 - RNA, 48 nt, Artificial Sequence
  Description of Artificial Sequence:  Enzymatic Nucleic Acid
uucugagaggaggaaacucccuucaaggacaucguccgggcauucaua

SEQ ID NO: 11234 - RNA, 48 nt, Artificial Sequence
  Description of Artificial Sequence:  Enzymatic Nucleic Acid
gauuauuuggaggaaacucccuucaaggacaucguccgggugagacca

SEQ ID NO: 11235 - RNA, 48 nt, Artificial Sequence
  Description of Artificial Sequence:  Enzymatic Nucleic Acid
uugccuucggaggaaacucccuucaaggacaucguccggguuugauua

SEQ ID NO: 11236 - RNA, 48 nt, Artificial Sequence
  Description of Artificial Sequence:  Enzymatic Nucleic Acid
uuugccuuggaggaaacucccuucaaggacaucguccgggcuuugauu

SEQ ID NO: 11237 - RNA, 48 nt, Artificial Sequence
  Description of Artificial Sequence:  Enzymatic Nucleic Acid
cuuuuugcggaggaaacucccuucaaggacaucguccggguuccuuug

SEQ ID NO: 11238 - RNA, 48 nt, Artificial Sequence
  Description of Artificial Sequence:  Enzymatic Nucleic Acid
ucuuuuugggaggaaacucccuucaaggacaucguccgggcuuccuuu

SEQ ID NO: 11239 - RNA, 48 nt, Artificial Sequence
  Description of Artificial Sequence:  Enzymatic Nucleic Acid
ccaaagauggaggaaacucccuucaaggacaucguccggguuuuugcc

SEQ ID NO: 11240 - RNA, 48 nt, Artificial Sequence
  Description of Artificial Sequence:  Enzymatic Nucleic Acid
cugggugcggaggaaacucccuucaaggacaucguccgggaaagaucu

SEQ ID NO: 11241 - RNA, 48 nt, Artificial Sequence
  Description of Artificial Sequence:  Enzymatic Nucleic Acid
ucugggugggaggaaacucccuucaaggacaucguccgggcaaagauc

SEQ ID NO: 11242 - RNA, 48 nt, Artificial Sequence
  Description of Artificial Sequence:  Enzymatic Nucleic Acid
ggucaaauggaggaaacucccuucaaggacaucguccgggugggugcc

SEQ ID NO: 11243 - RNA, 48 nt, Artificial Sequence
  Description of Artificial Sequence:  Enzymatic Nucleic Acid
aggaagguggaggaaacucccuucaaggacaucguccgggaaaucugg

SEQ ID NO: 11244 - RNA, 48 nt, Artificial Sequence
  Description of Artificial Sequence:  Enzymatic Nucleic Acid
uuucauguggaggaaacucccuucaaggacaucguccgggaggaaggu

SEQ ID NO: 11245 - RNA, 48 nt, Artificial Sequence
  Description of Artificial Sequence:  Enzymatic Nucleic Acid
guuucuuuggaggaaacucccuucaaggacaucguccgggaugucagg

SEQ ID NO: 11246 - RNA, 48 nt, Artificial Sequence
  Description of Artificial Sequence:  Enzymatic Nucleic Acid
cuuuguuuggaggaaacucccuucaaggacaucguccggguuucaugu

SEQ ID NO: 11247 - RNA, 48 nt, Artificial Sequence
  Description of Artificial Sequence:  Enzymatic Nucleic Acid
acaguauaggaggaaacucccuucaaggacaucguccggguuuguuuc

SEQ ID NO: 11248 - RNA, 48 nt, Artificial Sequence
  Description of Artificial Sequence:  Enzymatic Nucleic Acid
cuuguccaggaggaaacucccuucaaggacaucguccgggaguauacu

SEQ ID NO: 11249 - RNA, 48 nt, Artificial Sequence
  Description of Artificial Sequence:  Enzymatic Nucleic Acid
cucuugucggaggaaacucccuucaaggacaucguccgggacaguaua

SEQ ID NO: 11250 - RNA, 48 nt, Artificial Sequence
  Description of Artificial Sequence:  Enzymatic Nucleic Acid
ccucuuguggaggaaacucccuucaaggacaucguccgggcacaguau

SEQ ID NO: 11251 - RNA, 48 nt, Artificial Sequence
  Description of Artificial Sequence:  Enzymatic Nucleic Acid
ccaaaccuggaggaaacucccuucaaggacaucguccggguuguccac

SEQ ID NO: 11252 - RNA, 48 nt, Artificial Sequence
  Description of Artificial Sequence:  Enzymatic Nucleic Acid
ugccaaacggaggaaacucccuucaaggacaucguccgggucuugucc

SEQ ID NO: 11253 - RNA, 48 nt, Artificial Sequence
  Description of Artificial Sequence:  Enzymatic Nucleic Acid
augccaaaggaggaaacucccuucaaggacaucguccgggcucuuguc

SEQ ID NO: 11254 - RNA, 48 nt, Artificial Sequence
  Description of Artificial Sequence:  Enzymatic Nucleic Acid
auccaugcggaggaaacucccuucaaggacaucguccgggaaaccucu

SEQ ID NO: 11255 - RNA, 48 nt, Artificial Sequence
  Description of Artificial Sequence:  Enzymatic Nucleic Acid
aauccaugggaggaaacucccuucaaggacaucguccgggcaaaccuc

SEQ ID NO: 11256 - RNA, 48 nt, Artificial Sequence
  Description of Artificial Sequence:  Enzymatic Nucleic Acid
uuaaaaucggaggaaacucccuucaaggacaucguccgggaugccaaa

SEQ ID NO: 11257 - RNA, 48 nt, Artificial Sequence
  Description of Artificial Sequence:  Enzymatic Nucleic Acid
uuuaaaauggaggaaacucccuucaaggacaucguccgggcaugccaa

SEQ ID NO: 11258 - RNA, 48 nt, Artificial Sequence
  Description of Artificial Sequence:  Enzymatic Nucleic Acid
uucuauuuggaggaaacucccuucaaggacaucguccggguuuaaaau

SEQ ID NO: 11259 - RNA, 48 nt, Artificial Sequence
  Description of Artificial Sequence:  Enzymatic Nucleic Acid
aauuaauuggaggaaacucccuucaaggacaucguccggguauuucuu

SEQ ID NO: 11260 - RNA, 48 nt, Artificial Sequence
  Description of Artificial Sequence:  Enzymatic Nucleic Acid
accugagcggaggaaacucccuucaaggacaucguccgggaauuaauu

SEQ ID NO: 11261 - RNA, 48 nt, Artificial Sequence
  Description of Artificial Sequence:  Enzymatic Nucleic Acid
caccugagggaggaaacucccuucaaggacaucguccgggcaauuaau

SEQ ID NO: 11262 - RNA, 48 nt, Artificial Sequence
  Description of Artificial Sequence:  Enzymatic Nucleic Acid
aaauccacggaggaaacucccuucaaggacaucguccgggugagccaa

SEQ ID NO: 11263 - RNA, 48 nt, Artificial Sequence
  Description of Artificial Sequence:  Enzymatic Nucleic Acid
caaauccaggaggaaacucccuucaaggacaucguccgggcugagcca

SEQ ID NO: 11264 - RNA, 48 nt, Artificial Sequence
  Description of Artificial Sequence:  Enzymatic Nucleic Acid
gccaaaucggaggaaacucccuucaaggacaucguccgggaccugagc

SEQ ID NO: 11265 - RNA, 48 nt, Artificial Sequence
  Description of Artificial Sequence:  Enzymatic Nucleic Acid
ggccaaauggaggaaacucccuucaaggacaucguccgggcaccugag

SEQ ID NO: 11266 - RNA, 48 nt, Artificial Sequence
  Description of Artificial Sequence:  Enzymatic Nucleic Acid
aacuuggcggaggaaacucccuucaaggacaucguccgggaaauccac

SEQ ID NO: 11267 - RNA, 48 nt, Artificial Sequence
  Description of Artificial Sequence:  Enzymatic Nucleic Acid
aaacuuggggaggaaacucccuucaaggacaucguccgggcaaaucca

SEQ ID NO: 11268 - RNA, 48 nt, Artificial Sequence
  Description of Artificial Sequence:  Enzymatic Nucleic Acid
uuugaaaaggaggaaacucccuucaaggacaucguccggguuggccaa

SEQ ID NO: 11269 - RNA, 48 nt, Artificial Sequence
  Description of Artificial Sequence:  Enzymatic Nucleic Acid
guguuuugggaggaaacucccuucaaggacaucguccggguuugaaaa

SEQ ID NO: 11270 - RNA, 48 nt, Artificial Sequence
  Description of Artificial Sequence:  Enzymatic Nucleic Acid
cgucaauuggaggaaacucccuucaaggacaucguccggguguguuuu

SEQ ID NO: 11271 - RNA, 48 nt, Artificial Sequence
  Description of Artificial Sequence:  Enzymatic Nucleic Acid
cuuuccguggaggaaacucccuucaaggacaucguccgggaauucugu

SEQ ID NO: 11272 - RNA, 48 nt, Artificial Sequence
  Description of Artificial Sequence:  Enzymatic Nucleic Acid
agucuuucggaggaaacucccuucaaggacaucguccggggucaauuc

SEQ ID NO: 11273 - RNA, 48 nt, Artificial Sequence
  Description of Artificial Sequence:  Enzymatic Nucleic Acid
aagucuuuggaggaaacucccuucaaggacaucguccgggcgucaauu

SEQ ID NO: 11274 - RNA, 48 nt, Artificial Sequence
  Description of Artificial Sequence:  Enzymatic Nucleic Acid
acguaaguggaggaaacucccuucaaggacaucguccggguuuccguc

SEQ ID NO: 11275 - RNA, 48 nt, Artificial Sequence
  Description of Artificial Sequence:  Enzymatic Nucleic Acid
uuuaauaaggaggaaacucccuucaaggacaucguccgggguaagucu

SEQ ID NO: 11276 - RNA, 48 nt, Artificial Sequence
  Description of Artificial Sequence:  Enzymatic Nucleic Acid
auuuaacaggaggaaacucccuucaaggacaucguccgggguuuaaua

SEQ ID NO: 11277 - RNA, 48 nt, Artificial Sequence
  Description of Artificial Sequence:  Enzymatic Nucleic Acid
auauuuaaggaggaaacucccuucaaggacaucguccgggacguuuaa

SEQ ID NO: 11278 - RNA, 48 nt, Artificial Sequence
  Description of Artificial Sequence:  Enzymatic Nucleic Acid
cgccuucuggaggaaacucccuucaaggacaucguccgggguuauuau

SEQ ID NO: 11279 - RNA, 48 nt, Artificial Sequence
  Description of Artificial Sequence:  Enzymatic Nucleic Acid
uccgccuuggaggaaacucccuucaaggacaucguccgggucguuauu

SEQ ID NO: 11280 - RNA, 48 nt, Artificial Sequence
  Description of Artificial Sequence:  Enzymatic Nucleic Acid
cgcuccgcggaggaaacucccuucaaggacaucguccggguucucguu

SEQ ID NO: 11281 - RNA, 48 nt, Artificial Sequence
  Description of Artificial Sequence:  Enzymatic Nucleic Acid
acgcuccgggaggaaacucccuucaaggacaucguccgggcuucucgu

SEQ ID NO: 11282 - RNA, 48 nt, Artificial Sequence
  Description of Artificial Sequence:  Enzymatic Nucleic Acid
ucacgcucggaggaaacucccuucaaggacaucguccggggccuucuc

SEQ ID NO: 11283 - RNA, 48 nt, Artificial Sequence
  Description of Artificial Sequence:  Enzymatic Nucleic Acid
uucacgcuggaggaaacucccuucaaggacaucguccgggcgccuucu

SEQ ID NO: 11284 - RNA, 48 nt, Artificial Sequence
  Description of Artificial Sequence:  Enzymatic Nucleic Acid
acuucacgggaggaaacucccuucaaggacaucguccggguccgccuu

SEQ ID NO: 11285 - RNA, 48 nt, Artificial Sequence
  Description of Artificial Sequence:  Enzymatic Nucleic Acid
uuacuucaggaggaaacucccuucaaggacaucguccggggcuccgcc

SEQ ID NO: 11286 - RNA, 48 nt, Artificial Sequence
  Description of Artificial Sequence:  Enzymatic Nucleic Acid
uuuuacuuggaggaaacucccuucaaggacaucguccgggacgcuccg

SEQ ID NO: 11287 - RNA, 48 nt, Artificial Sequence
  Description of Artificial Sequence:  Enzymatic Nucleic Acid
ugcuuuuaggaggaaacucccuucaaggacaucguccggguucacgcu

SEQ ID NO: 11288 - RNA, 48 nt, Artificial Sequence
  Description of Artificial Sequence:  Enzymatic Nucleic Acid
ugccaaugggaggaaacucccuucaaggacaucguccggguuuuacuu

SEQ ID NO: 11289 - RNA, 48 nt, Artificial Sequence
  Description of Artificial Sequence:  Enzymatic Nucleic Acid
aguuuugcggaggaaacucccuucaaggacaucguccgggaaugcuuu

SEQ ID NO: 11290 - RNA, 48 nt, Artificial Sequence
  Description of Artificial Sequence:  Enzymatic Nucleic Acid
aaguuuugggaggaaacucccuucaaggacaucguccgggcaaugcuu

SEQ ID NO: 11291 - RNA, 48 nt, Artificial Sequence
  Description of Artificial Sequence:  Enzymatic Nucleic Acid
uacaugauggaggaaacucccuucaaggacaucguccgggaaguuuug

SEQ ID NO: 11292 - RNA, 48 nt, Artificial Sequence
  Description of Artificial Sequence:  Enzymatic Nucleic Acid
aauauuuaggaggaaacucccuucaaggacaucguccgggaugaucaa

SEQ ID NO: 11293 - RNA, 48 nt, Artificial Sequence
  Description of Artificial Sequence:  Enzymatic Nucleic Acid
guagugaaggaggaaacucccuucaaggacaucguccgggaauauuua

SEQ ID NO: 11294 - RNA, 48 nt, Artificial Sequence
  Description of Artificial Sequence:  Enzymatic Nucleic Acid
ccaacagcggaggaaacucccuucaaggacaucguccgggauuguagu

SEQ ID NO: 11295 - RNA, 48 nt, Artificial Sequence
  Description of Artificial Sequence:  Enzymatic Nucleic Acid
cccaacagggaggaaacucccuucaaggacaucguccgggcauuguag

SEQ ID NO: 11296 - RNA, 48 nt, Artificial Sequence
  Description of Artificial Sequence:  Enzymatic Nucleic Acid
caucccaaggaggaaacucccuucaaggacaucguccgggagccauug

SEQ ID NO: 11297 - RNA, 48 nt, Artificial Sequence
  Description of Artificial Sequence:  Enzymatic Nucleic Acid
auccauccggaggaaacucccuucaaggacaucguccgggaacagcca

SEQ ID NO: 11298 - RNA, 48 nt, Artificial Sequence
  Description of Artificial Sequence:  Enzymatic Nucleic Acid
aauccaucggaggaaacucccuucaaggacaucguccgggcaacagcc

SEQ ID NO: 11299 - RNA, 48 nt, Artificial Sequence
  Description of Artificial Sequence:  Enzymatic Nucleic Acid
aaauccauggaggaaacucccuucaaggacaucguccgggccaacagc

SEQ ID NO: 11300 - RNA, 48 nt, Artificial Sequence
  Description of Artificial Sequence:  Enzymatic Nucleic Acid
aucaaaucggaggaaacucccuucaaggacaucguccgggaucccaac

SEQ ID NO: 11301 - RNA, 48 nt, Artificial Sequence
  Description of Artificial Sequence:  Enzymatic Nucleic Acid
aaucaaauggaggaaacucccuucaaggacaucguccgggcaucccaa

SEQ ID NO: 11302 - RNA, 48 nt, Artificial Sequence
  Description of Artificial Sequence:  Enzymatic Nucleic Acid
aucauaauggaggaaacucccuucaaggacaucguccgggaaauccau

SEQ ID NO: 11303 - RNA, 48 nt, Artificial Sequence
  Description of Artificial Sequence:  Enzymatic Nucleic Acid
cucaggauggaggaaacucccuucaaggacaucguccgggauaaucaa

SEQ ID NO: 11304 - RNA, 48 nt, Artificial Sequence
  Description of Artificial Sequence:  Enzymatic Nucleic Acid
acuggucuggaggaaacucccuucaaggacaucguccgggaggaucau

SEQ ID NO: 11305 - RNA, 48 nt, Artificial Sequence
  Description of Artificial Sequence:  Enzymatic Nucleic Acid
ucacugguggaggaaacucccuucaaggacaucguccgggucaggauc

SEQ ID NO: 11306 - RNA, 48 nt, Artificial Sequence
  Description of Artificial Sequence:  Enzymatic Nucleic Acid
aaucaucaggaggaaacucccuucaaggacaucguccggguggucuca

SEQ ID NO: 11307 - RNA, 48 nt, Artificial Sequence
  Description of Artificial Sequence:  Enzymatic Nucleic Acid
agaaucauggaggaaacucccuucaaggacaucguccgggacuggucu

SEQ ID NO: 11308 - RNA, 48 nt, Artificial Sequence
  Description of Artificial Sequence:  Enzymatic Nucleic Acid
aagagaauggaggaaacucccuucaaggacaucguccgggaucacugg

SEQ ID NO: 11309 - RNA, 48 nt, Artificial Sequence
  Description of Artificial Sequence:  Enzymatic Nucleic Acid
acugcucuggaggaaacucccuucaaggacaucguccgggaagagaau

SEQ ID NO: 11310 - RNA, 48 nt, Artificial Sequence
  Description of Artificial Sequence:  Enzymatic Nucleic Acid
ucacugcuggaggaaacucccuucaaggacaucguccgggucaagaga

SEQ ID NO: 11311 - RNA, 48 nt, Artificial Sequence
  Description of Artificial Sequence:  Enzymatic Nucleic Acid
aaucacugggaggaaacucccuucaaggacaucguccgggucucaaga

SEQ ID NO: 11312 - RNA, 48 nt, Artificial Sequence
  Description of Artificial Sequence:  Enzymatic Nucleic Acid
cauaaucaggaggaaacucccuucaaggacaucguccgggugcucuca

SEQ ID NO: 11313 - RNA, 48 nt, Artificial Sequence
  Description of Artificial Sequence:  Enzymatic Nucleic Acid
aucauaauggaggaaacucccuucaaggacaucguccgggacugcucu

SEQ ID NO: 11314 - RNA, 48 nt, Artificial Sequence
  Description of Artificial Sequence:  Enzymatic Nucleic Acid
cucaggauggaggaaacucccuucaaggacaucguccgggauaaucac

SEQ ID NO: 11315 - RNA, 48 nt, Artificial Sequence
  Description of Artificial Sequence:  Enzymatic Nucleic Acid
gcuguucuggaggaaacucccuucaaggacaucguccgggaggaucau

SEQ ID NO: 11316 - RNA, 48 nt, Artificial Sequence
  Description of Artificial Sequence:  Enzymatic Nucleic Acid
uugcuguuggaggaaacucccuucaaggacaucguccgggucaggauc

SEQ ID NO: 11317 - RNA, 48 nt, Artificial Sequence
  Description of Artificial Sequence:  Enzymatic Nucleic Acid
uauuuuugggaggaaacucccuucaaggacaucguccggguguucuca

SEQ ID NO: 11318 - RNA, 48 nt, Artificial Sequence
  Description of Artificial Sequence:  Enzymatic Nucleic Acid
accuugaaggaggaaacucccuucaaggacaucguccggguauuuuug

SEQ ID NO: 11319 - RNA, 48 nt, Artificial Sequence
  Description of Artificial Sequence:  Enzymatic Nucleic Acid
ucuuugacggaggaaacucccuucaaggacaucguccggguugaacua

SEQ ID NO: 11320 - RNA, 48 nt, Artificial Sequence
  Description of Artificial Sequence:  Enzymatic Nucleic Acid
gucuuugaggaggaaacucccuucaaggacaucguccgggcuugaacu

SEQ ID NO: 11321 - RNA, 48 nt, Artificial Sequence
  Description of Artificial Sequence:  Enzymatic Nucleic Acid
cacuuaguggaggaaacucccuucaaggacaucguccggguuugaccu

SEQ ID NO: 11322 - RNA, 48 nt, Artificial Sequence
  Description of Artificial Sequence:  Enzymatic Nucleic Acid
aaaaggcaggaggaaacucccuucaaggacaucguccggguuagucuu

SEQ ID NO: 11323 - RNA, 48 nt, Artificial Sequence
  Description of Artificial Sequence:  Enzymatic Nucleic Acid
ugaaaaggggaggaaacucccuucaaggacaucguccgggacuuaguc

SEQ ID NO: 11324 - RNA, 48 nt, Artificial Sequence
  Description of Artificial Sequence:  Enzymatic Nucleic Acid
cagaauucggaggaaacucccuucaaggacaucguccgggauuuggau

SEQ ID NO: 11325 - RNA, 48 nt, Artificial Sequence
  Description of Artificial Sequence:  Enzymatic Nucleic Acid
acagaauuggaggaaacucccuucaaggacaucguccgggcauuugga

SEQ ID NO: 11326 - RNA, 48 nt, Artificial Sequence
  Description of Artificial Sequence:  Enzymatic Nucleic Acid
cuuuaucaggaggaaacucccuucaaggacaucguccgggagaauucc

SEQ ID NO: 11327 - RNA, 48 nt, Artificial Sequence
  Description of Artificial Sequence:  Enzymatic Nucleic Acid
cccuuuauggaggaaacucccuucaaggacaucguccgggacagaauu

SEQ ID NO: 11328 - RNA, 48 nt, Artificial Sequence
  Description of Artificial Sequence:  Enzymatic Nucleic Acid
caagguccggaggaaacucccuucaaggacaucguccggguuuaucac

SEQ ID NO: 11329 - RNA, 48 nt, Artificial Sequence
  Description of Artificial Sequence:  Enzymatic Nucleic Acid
ccaaggucggaggaaacucccuucaaggacaucguccgggcuuuauca

SEQ ID NO: 11330 - RNA, 48 nt, Artificial Sequence
  Description of Artificial Sequence:  Enzymatic Nucleic Acid
uccaagguggaggaaacucccuucaaggacaucguccgggccuuuauc

SEQ ID NO: 11331 - RNA, 48 nt, Artificial Sequence
  Description of Artificial Sequence:  Enzymatic Nucleic Acid
cauuguucggaggaaacucccuucaaggacaucguccgggaagguccc

SEQ ID NO: 11332 - RNA, 48 nt, Artificial Sequence
  Description of Artificial Sequence:  Enzymatic Nucleic Acid
ccauuguuggaggaaacucccuucaaggacaucguccgggcaaggucc

SEQ ID NO: 11333 - RNA, 48 nt, Artificial Sequence
  Description of Artificial Sequence:  Enzymatic Nucleic Acid
uuucaaucggaggaaacucccuucaaggacaucguccgggauuguucc

SEQ ID NO: 11334 - RNA, 48 nt, Artificial Sequence
  Description of Artificial Sequence:  Enzymatic Nucleic Acid
uuuucaauggaggaaacucccuucaaggacaucguccgggcauuguuc

SEQ ID NO: 11335 - RNA, 48 nt, Artificial Sequence
  Description of Artificial Sequence:  Enzymatic Nucleic Acid
ucuuuuuuggaggaaacucccuucaaggacaucguccgggaauccauu

SEQ ID NO: 11336 - RNA, 48 nt, Artificial Sequence
  Description of Artificial Sequence:  Enzymatic Nucleic Acid
cgccucuuggaggaaacucccuucaaggacaucguccggguuuuuuca

SEQ ID NO: 11337 - RNA, 48 nt, Artificial Sequence
  Description of Artificial Sequence:  Enzymatic Nucleic Acid
ucucgccuggaggaaacucccuucaaggacaucguccggguucuuuuu

SEQ ID NO: 11338 - RNA, 48 nt, Artificial Sequence
  Description of Artificial Sequence:  Enzymatic Nucleic Acid
uuucucgcggaggaaacucccuucaaggacaucguccgggucuucuuu

SEQ ID NO: 11339 - RNA, 48 nt, Artificial Sequence
  Description of Artificial Sequence:  Enzymatic Nucleic Acid
guuucucgggaggaaacucccuucaaggacaucguccgggcucuucuu

SEQ ID NO: 11340 - RNA, 48 nt, Artificial Sequence
  Description of Artificial Sequence:  Enzymatic Nucleic Acid
uaguuucuggaggaaacucccuucaaggacaucguccggggccucuuc

SEQ ID NO: 11341 - RNA, 48 nt, Artificial Sequence
  Description of Artificial Sequence:  Enzymatic Nucleic Acid
ucuaguuuggaggaaacucccuucaaggacaucguccgggucgccucu

SEQ ID NO: 11342 - RNA, 48 nt, Artificial Sequence
  Description of Artificial Sequence:  Enzymatic Nucleic Acid
aacuuuguggaggaaacucccuucaaggacaucguccggguaguuucu

SEQ ID NO: 11343 - RNA, 48 nt, Artificial Sequence
  Description of Artificial Sequence:  Enzymatic Nucleic Acid
agccaaaaggaggaaacucccuucaaggacaucguccggguuugucua

SEQ ID NO: 11344 - RNA, 48 nt, Artificial Sequence
  Description of Artificial Sequence:  Enzymatic Nucleic Acid
uccaaagcggaggaaacucccuucaaggacaucguccgggaaaacuuu

SEQ ID NO: 11345 - RNA, 48 nt, Artificial Sequence
  Description of Artificial Sequence:  Enzymatic Nucleic Acid
uuccaaagggaggaaacucccuucaaggacaucguccgggcaaaacuu

SEQ ID NO: 11346 - RNA, 48 nt, Artificial Sequence
  Description of Artificial Sequence:  Enzymatic Nucleic Acid
aagaguucggaggaaacucccuucaaggacaucguccgggaaagccaa

SEQ ID NO: 11347 - RNA, 48 nt, Artificial Sequence
  Description of Artificial Sequence:  Enzymatic Nucleic Acid
aaagaguuggaggaaacucccuucaaggacaucguccgggcaaagcca

SEQ ID NO: 11348 - RNA, 48 nt, Artificial Sequence
  Description of Artificial Sequence:  Enzymatic Nucleic Acid
uauuuguuggaggaaacucccuucaaggacaucguccgggaaagaguu

SEQ ID NO: 11349 - RNA, 48 nt, Artificial Sequence
  Description of Artificial Sequence:  Enzymatic Nucleic Acid
auccacccggaggaaacucccuucaaggacaucguccggguuuuguua

SEQ ID NO: 11350 - RNA, 48 nt, Artificial Sequence
  Description of Artificial Sequence:  Enzymatic Nucleic Acid
aauccaccggaggaaacucccuucaaggacaucguccgggcuuuuguu

SEQ ID NO: 11351 - RNA, 48 nt, Artificial Sequence
  Description of Artificial Sequence:  Enzymatic Nucleic Acid
uaauccacggaggaaacucccuucaaggacaucguccgggccuuuugu

SEQ ID NO: 11352 - RNA, 48 nt, Artificial Sequence
  Description of Artificial Sequence:  Enzymatic Nucleic Acid
auaauccaggaggaaacucccuucaaggacaucguccgggcccuuuug

SEQ ID NO: 11353 - RNA, 48 nt, Artificial Sequence
  Description of Artificial Sequence:  Enzymatic Nucleic Acid
auauaaucggaggaaacucccuucaaggacaucguccgggaccccuuu

SEQ ID NO: 11354 - RNA, 48 nt, Artificial Sequence
  Description of Artificial Sequence:  Enzymatic Nucleic Acid
uauauaauggaggaaacucccuucaaggacaucguccgggcaccccuu

SEQ ID NO: 11355 - RNA, 48 nt, Artificial Sequence
  Description of Artificial Sequence:  Enzymatic Nucleic Acid
uaagaucuggaggaaacucccuucaaggacaucguccggguaugaauu

SEQ ID NO: 11356 - RNA, 48 nt, Artificial Sequence
  Description of Artificial Sequence:  Enzymatic Nucleic Acid
cuuaagauggaggaaacucccuucaaggacaucguccgggucuaugaa

SEQ ID NO: 11357 - RNA, 48 nt, Artificial Sequence
  Description of Artificial Sequence:  Enzymatic Nucleic Acid
uuacuuggggaggaaacucccuucaaggacaucguccggguuaagauc

SEQ ID NO: 11358 - RNA, 48 nt, Artificial Sequence
  Description of Artificial Sequence:  Enzymatic Nucleic Acid
auauauuaggaggaaacucccuucaaggacaucguccggguuggcuua

SEQ ID NO: 11359 - RNA, 48 nt, Artificial Sequence
  Description of Artificial Sequence:  Enzymatic Nucleic Acid
uguaucuaggaggaaacucccuucaaggacaucguccggguaagaaua

SEQ ID NO: 11360 - RNA, 48 nt, Artificial Sequence
  Description of Artificial Sequence:  Enzymatic Nucleic Acid
uuuuguauggaggaaacucccuucaaggacaucguccggguacuaaga

SEQ ID NO: 11361 - RNA, 48 nt, Artificial Sequence
  Description of Artificial Sequence:  Enzymatic Nucleic Acid
aaucuuuaggaggaaacucccuucaaggacaucguccggguuguuuug

SEQ ID NO: 11362 - RNA, 48 nt, Artificial Sequence
  Description of Artificial Sequence:  Enzymatic Nucleic Acid
ucuccaauggaggaaacucccuucaaggacaucguccggguuuacuug

SEQ ID NO: 11363 - RNA, 48 nt, Artificial Sequence
  Description of Artificial Sequence:  Enzymatic Nucleic Acid
aaagucucggaggaaacucccuucaaggacaucguccgggaaucuuua

SEQ ID NO: 11364 - RNA, 48 nt, Artificial Sequence
  Description of Artificial Sequence:  Enzymatic Nucleic Acid
caaagucuggaggaaacucccuucaaggacaucguccgggcaaucuuu

SEQ ID NO: 11365 - RNA, 48 nt, Artificial Sequence
  Description of Artificial Sequence:  Enzymatic Nucleic Acid
uccaaaguggaggaaacucccuucaaggacaucguccggguccaaucu

SEQ ID NO: 11366 - RNA, 48 nt, Artificial Sequence
  Description of Artificial Sequence:  Enzymatic Nucleic Acid
uacaagucggaggaaacucccuucaaggacaucguccgggaaagucuc

SEQ ID NO: 11367 - RNA, 48 nt, Artificial Sequence
  Description of Artificial Sequence:  Enzymatic Nucleic Acid
uuacaaguggaggaaacucccuucaaggacaucguccgggcaaagucu

SEQ ID NO: 11368 - RNA, 48 nt, Artificial Sequence
  Description of Artificial Sequence:  Enzymatic Nucleic Acid
agauguuaggaggaaacucccuucaaggacaucguccgggaaguccaa

SEQ ID NO: 11369 - RNA, 48 nt, Artificial Sequence
  Description of Artificial Sequence:  Enzymatic Nucleic Acid
ucauuuuuggaggaaacucccuucaaggacaucguccgggagagaugu

SEQ ID NO: 11370 - RNA, 48 nt, Artificial Sequence
  Description of Artificial Sequence:  Enzymatic Nucleic Acid
cuuuccauggaggaaacucccuucaaggacaucguccgggauuuuuca

SEQ ID NO: 11371 - RNA, 48 nt, Artificial Sequence
  Description of Artificial Sequence:  Enzymatic Nucleic Acid
ucgcuuucggaggaaacucccuucaaggacaucguccgggaucauuuu

SEQ ID NO: 11372 - RNA, 48 nt, Artificial Sequence
  Description of Artificial Sequence:  Enzymatic Nucleic Acid
uucgcuuuggaggaaacucccuucaaggacaucguccgggcaucauuu

SEQ ID NO: 11373 - RNA, 48 nt, Artificial Sequence
  Description of Artificial Sequence:  Enzymatic Nucleic Acid
cuuguucgggaggaaacucccuucaaggacaucguccggguuuccauc

SEQ ID NO: 11374 - RNA, 48 nt, Artificial Sequence
  Description of Artificial Sequence:  Enzymatic Nucleic Acid
uccuuguuggaggaaacucccuucaaggacaucguccggggcuuucca

SEQ ID NO: 11375 - RNA, 48 nt, Artificial Sequence
  Description of Artificial Sequence:  Enzymatic Nucleic Acid
ccuuacucggaggaaacucccuucaaggacaucguccggguuguucgc

SEQ ID NO: 11376 - RNA, 48 nt, Artificial Sequence
  Description of Artificial Sequence:  Enzymatic Nucleic Acid
cccuuacuggaggaaacucccuucaaggacaucguccgggcuuguucg

SEQ ID NO: 11377 - RNA, 48 nt, Artificial Sequence
  Description of Artificial Sequence:  Enzymatic Nucleic Acid
uucccuuaggaggaaacucccuucaaggacaucguccggguccuuguu

SEQ ID NO: 11378 - RNA, 48 nt, Artificial Sequence
  Description of Artificial Sequence:  Enzymatic Nucleic Acid
aaaguuccggaggaaacucccuucaaggacaucguccggguuacuccu

SEQ ID NO: 11379 - RNA, 48 nt, Artificial Sequence
  Description of Artificial Sequence:  Enzymatic Nucleic Acid
caaaguucggaggaaacucccuucaaggacaucguccgggcuuacucc

SEQ ID NO: 11380 - RNA, 48 nt, Artificial Sequence
  Description of Artificial Sequence:  Enzymatic Nucleic Acid
gcaaaguuggaggaaacucccuucaaggacaucguccgggccuuacuc

SEQ ID NO: 11381 - RNA, 48 nt, Artificial Sequence
  Description of Artificial Sequence:  Enzymatic Nucleic Acid
auguaucgggaggaaacucccuucaaggacaucguccgggaaaguucc

SEQ ID NO: 11382 - RNA, 48 nt, Artificial Sequence
  Description of Artificial Sequence:  Enzymatic Nucleic Acid
ucauguauggaggaaacucccuucaaggacaucguccggggcaaaguu

SEQ ID NO: 11383 - RNA, 48 nt, Artificial Sequence
  Description of Artificial Sequence:  Enzymatic Nucleic Acid
ucugggcuggaggaaacucccuucaaggacaucguccgggauguaucg

SEQ ID NO: 11384 - RNA, 48 nt, Artificial Sequence
  Description of Artificial Sequence:  Enzymatic Nucleic Acid
guucugggggaggaaacucccuucaaggacaucguccgggucauguau

SEQ ID NO: 11385 - RNA, 48 nt, Artificial Sequence
  Description of Artificial Sequence:  Enzymatic Nucleic Acid
aaucuguuggaggaaacucccuucaaggacaucguccgggugggcuca

SEQ ID NO: 11386 - RNA, 48 nt, Artificial Sequence
  Description of Artificial Sequence:  Enzymatic Nucleic Acid
gaagaaauggaggaaacucccuucaaggacaucguccggguguucugg

SEQ ID NO: 11387 - RNA, 48 nt, Artificial Sequence
  Description of Artificial Sequence:  Enzymatic Nucleic Acid
uagucuugggaggaaacucccuucaaggacaucguccggggaagaaau

SEQ ID NO: 11388 - RNA, 48 nt, Artificial Sequence
  Description of Artificial Sequence:  Enzymatic Nucleic Acid
uccauaguggaggaaacucccuucaaggacaucguccggguugcgaag

SEQ ID NO: 11389 - RNA, 48 nt, Artificial Sequence
  Description of Artificial Sequence:  Enzymatic Nucleic Acid
uuccuuucggaggaaacucccuucaaggacaucguccgggauagucuu

SEQ ID NO: 11390 - RNA, 48 nt, Artificial Sequence
  Description of Artificial Sequence:  Enzymatic Nucleic Acid
cuuccuuuggaggaaacucccuucaaggacaucguccgggcauagucu

SEQ ID NO: 11391 - RNA, 48 nt, Artificial Sequence
  Description of Artificial Sequence:  Enzymatic Nucleic Acid
uccacuucggaggaaacucccuucaaggacaucguccggguuuccaua

SEQ ID NO: 11392 - RNA, 48 nt, Artificial Sequence
  Description of Artificial Sequence:  Enzymatic Nucleic Acid
guccacuuggaggaaacucccuucaaggacaucguccgggcuuuccau

SEQ ID NO: 11393 - RNA, 48 nt, Artificial Sequence
  Description of Artificial Sequence:  Enzymatic Nucleic Acid
gagguccaggaggaaacucccuucaaggacaucguccggguuccuuuc

SEQ ID NO: 11394 - RNA, 48 nt, Artificial Sequence
  Description of Artificial Sequence:  Enzymatic Nucleic Acid
uagaggucggaggaaacucccuucaaggacaucguccgggacuuccuu

SEQ ID NO: 11395 - RNA, 48 nt, Artificial Sequence
  Description of Artificial Sequence:  Enzymatic Nucleic Acid
guagagguggaggaaacucccuucaaggacaucguccgggcacuuccu

SEQ ID NO: 11396 - RNA, 48 nt, Artificial Sequence
  Description of Artificial Sequence:  Enzymatic Nucleic Acid
ccccaaagggaggaaacucccuucaaggacaucguccgggguagaggu

SEQ ID NO: 11397 - RNA, 48 nt, Artificial Sequence
  Description of Artificial Sequence:  Enzymatic Nucleic Acid
auuagcccggaggaaacucccuucaaggacaucguccgggaaagcgua

SEQ ID NO: 11398 - RNA, 48 nt, Artificial Sequence
  Description of Artificial Sequence:  Enzymatic Nucleic Acid
aauuagccggaggaaacucccuucaaggacaucguccgggcaaagcgu

SEQ ID NO: 11399 - RNA, 48 nt, Artificial Sequence
  Description of Artificial Sequence:  Enzymatic Nucleic Acid
gaauuagcggaggaaacucccuucaaggacaucguccgggccaaagcg

SEQ ID NO: 11400 - RNA, 48 nt, Artificial Sequence
  Description of Artificial Sequence:  Enzymatic Nucleic Acid
agaauuagggaggaaacucccuucaaggacaucguccgggcccaaagc

SEQ ID NO: 11401 - RNA, 48 nt, Artificial Sequence
  Description of Artificial Sequence:  Enzymatic Nucleic Acid
aaguucagggaggaaacucccuucaaggacaucguccgggaagaauua

SEQ ID NO: 11402 - RNA, 48 nt, Artificial Sequence
  Description of Artificial Sequence:  Enzymatic Nucleic Acid
aagaaguuggaggaaacucccuucaaggacaucguccgggagcaagaa

SEQ ID NO: 11403 - RNA, 48 nt, Artificial Sequence
  Description of Artificial Sequence:  Enzymatic Nucleic Acid
gucacauaggaggaaacucccuucaaggacaucguccgggaugaagaa

SEQ ID NO: 11404 - RNA, 48 nt, Artificial Sequence
  Description of Artificial Sequence:  Enzymatic Nucleic Acid
cagugucaggaggaaacucccuucaaggacaucguccgggauacauga

SEQ ID NO: 11405 - RNA, 48 nt, Artificial Sequence
  Description of Artificial Sequence:  Enzymatic Nucleic Acid
agcaguguggaggaaacucccuucaaggacaucguccgggacauacau

SEQ ID NO: 11406 - RNA, 48 nt, Artificial Sequence
  Description of Artificial Sequence:  Enzymatic Nucleic Acid
uucaaaagggaggaaacucccuucaaggacaucguccgggagugucac

SEQ ID NO: 11407 - RNA, 48 nt, Artificial Sequence
  Description of Artificial Sequence:  Enzymatic Nucleic Acid
ugauguuuggaggaaacucccuucaaggacaucguccgggaaaagcag

SEQ ID NO: 11408 - RNA, 48 nt, Artificial Sequence
  Description of Artificial Sequence:  Enzymatic Nucleic Acid
gugaaaaaggaggaaacucccuucaaggacaucguccggguuugaugu

SEQ ID NO: 11409 - RNA, 48 nt, Artificial Sequence
  Description of Artificial Sequence:  Enzymatic Nucleic Acid
ccguagguggaggaaacucccuucaaggacaucguccgggugugaaaa

SEQ ID NO: 11410 - RNA, 48 nt, Artificial Sequence
  Description of Artificial Sequence:  Enzymatic Nucleic Acid
ugccauccggaggaaacucccuucaaggacaucguccgggguaggucu

SEQ ID NO: 11411 - RNA, 48 nt, Artificial Sequence
  Description of Artificial Sequence:  Enzymatic Nucleic Acid
augccaucggaggaaacucccuucaaggacaucguccgggcguagguc

SEQ ID NO: 11412 - RNA, 48 nt, Artificial Sequence
  Description of Artificial Sequence:  Enzymatic Nucleic Acid
gaugccauggaggaaacucccuucaaggacaucguccgggccguaggu

SEQ ID NO: 11413 - RNA, 48 nt, Artificial Sequence
  Description of Artificial Sequence:  Enzymatic Nucleic Acid
gaugaugcggaggaaacucccuucaaggacaucguccgggaucccgua

SEQ ID NO: 11414 - RNA, 48 nt, Artificial Sequence
  Description of Artificial Sequence:  Enzymatic Nucleic Acid
agaugaugggaggaaacucccuucaaggacaucguccgggcaucccgu

SEQ ID NO: 11415 - RNA, 48 nt, Artificial Sequence
  Description of Artificial Sequence:  Enzymatic Nucleic Acid
aaauauauggaggaaacucccuucaaggacaucguccgggugagauga

SEQ ID NO: 11416 - RNA, 48 nt, Artificial Sequence
  Description of Artificial Sequence:  Enzymatic Nucleic Acid
uuuuuuauggaggaaacucccuucaaggacaucguccgggaaauauau

SEQ ID NO: 11417 - RNA, 48 nt, Artificial Sequence
  Description of Artificial Sequence:  Enzymatic Nucleic Acid
aguuuuuuggaggaaacucccuucaaggacaucguccggguuuuuuau

SEQ ID NO: 11418 - RNA, 48 nt, Artificial Sequence
  Description of Artificial Sequence:  Enzymatic Nucleic Acid
aguaauuuggaggaaacucccuucaaggacaucguccggguguagaag

SEQ ID NO: 11419 - RNA, 48 nt, Artificial Sequence
  Description of Artificial Sequence:  Enzymatic Nucleic Acid
ucagguuuggaggaaacucccuucaaggacaucguccggguuugagag

SEQ ID NO: 11420 - RNA, 48 nt, Artificial Sequence
  Description of Artificial Sequence:  Enzymatic Nucleic Acid
ucgauccuggaggaaacucccuucaaggacaucguccgggagguuucu

SEQ ID NO: 11421 - RNA, 48 nt, Artificial Sequence
  Description of Artificial Sequence:  Enzymatic Nucleic Acid
ggucgaucggaggaaacucccuucaaggacaucguccgggucagguuu

SEQ ID NO: 11422 - RNA, 48 nt, Artificial Sequence
  Description of Artificial Sequence:  Enzymatic Nucleic Acid
aggucgauggaggaaacucccuucaaggacaucguccgggcucagguu

SEQ ID NO: 11423 - RNA, 48 nt, Artificial Sequence
  Description of Artificial Sequence:  Enzymatic Nucleic Acid
uguuagguggaggaaacucccuucaaggacaucguccggggauccuca

SEQ ID NO: 11424 - RNA, 48 nt, Artificial Sequence
  Description of Artificial Sequence:  Enzymatic Nucleic Acid
uaguauuuggaggaaacucccuucaaggacaucguccgggagaugugu

SEQ ID NO: 11425 - RNA, 48 nt, Artificial Sequence
  Description of Artificial Sequence:  Enzymatic Nucleic Acid
ucaaggucggaggaaacucccuucaaggacaucguccggguuaguauu

SEQ ID NO: 11426 - RNA, 48 nt, Artificial Sequence
  Description of Artificial Sequence:  Enzymatic Nucleic Acid
gucaagguggaggaaacucccuucaaggacaucguccgggcuuaguau

SEQ ID NO: 11427 - RNA, 48 nt, Artificial Sequence
  Description of Artificial Sequence:  Enzymatic Nucleic Acid
cacacaguggaggaaacucccuucaaggacaucguccgggaagguccu

SEQ ID NO: 11428 - RNA, 48 nt, Artificial Sequence
  Description of Artificial Sequence:  Enzymatic Nucleic Acid
cuuccacaggaggaaacucccuucaaggacaucguccgggagucaagg

SEQ ID NO: 11429 - RNA, 48 nt, Artificial Sequence
  Description of Artificial Sequence:  Enzymatic Nucleic Acid
uucuuccaggaggaaacucccuucaaggacaucguccgggacagucaa

SEQ ID NO: 11430 - RNA, 48 nt, Artificial Sequence
  Description of Artificial Sequence:  Enzymatic Nucleic Acid
uuuucuucggaggaaacucccuucaaggacaucguccgggacacaguc

SEQ ID NO: 11431 - RNA, 48 nt, Artificial Sequence
  Description of Artificial Sequence:  Enzymatic Nucleic Acid
cuuuucuuggaggaaacucccuucaaggacaucguccgggcacacagu

SEQ ID NO: 11432 - RNA, 48 nt, Artificial Sequence
  Description of Artificial Sequence:  Enzymatic Nucleic Acid
gggcuuuuggaggaaacucccuucaaggacaucguccggguuccacac

SEQ ID NO: 11433 - RNA, 48 nt, Artificial Sequence
  Description of Artificial Sequence:  Enzymatic Nucleic Acid
ucucugggggaggaaacucccuucaaggacaucguccggguuuucuuc

SEQ ID NO: 11434 - RNA, 48 nt, Artificial Sequence
  Description of Artificial Sequence:  Enzymatic Nucleic Acid
auuuuucuggaggaaacucccuucaaggacaucguccgggugggcuuu

SEQ ID NO: 11435 - RNA, 48 nt, Artificial Sequence
  Description of Artificial Sequence:  Enzymatic Nucleic Acid
ucauuuuuggaggaaacucccuucaaggacaucguccgggucugggcu

SEQ ID NO: 11436 - RNA, 48 nt, Artificial Sequence
  Description of Artificial Sequence:  Enzymatic Nucleic Acid
gugucguuggaggaaacucccuucaaggacaucguccgggauuuuucu

SEQ ID NO: 11437 - RNA, 48 nt, Artificial Sequence
  Description of Artificial Sequence:  Enzymatic Nucleic Acid
auguguguggaggaaacucccuucaaggacaucguccgggguucauuu

SEQ ID NO: 11438 - RNA, 48 nt, Artificial Sequence
  Description of Artificial Sequence:  Enzymatic Nucleic Acid
ggcucuaaggaggaaacucccuucaaggacaucguccgggaugugugu

SEQ ID NO: 11439 - RNA, 48 nt, Artificial Sequence
  Description of Artificial Sequence:  Enzymatic Nucleic Acid
gaagggcuggaggaaacucccuucaaggacaucguccggguaacaugu

SEQ ID NO: 11440 - RNA, 48 nt, Artificial Sequence
  Description of Artificial Sequence:  Enzymatic Nucleic Acid
cagaagggggaggaaacucccuucaaggacaucguccgggucuaacau

SEQ ID NO: 11441 - RNA, 48 nt, Artificial Sequence
  Description of Artificial Sequence:  Enzymatic Nucleic Acid
uacuuuuuggaggaaacucccuucaaggacaucguccgggagaagggc

SEQ ID NO: 11442 - RNA, 48 nt, Artificial Sequence
  Description of Artificial Sequence:  Enzymatic Nucleic Acid
gcaggauaggaggaaacucccuucaaggacaucguccggguuuuucag

SEQ ID NO: 11443 - RNA, 48 nt, Artificial Sequence
  Description of Artificial Sequence:  Enzymatic Nucleic Acid
aucagaagggaggaaacucccuucaaggacaucguccgggaggauacu

SEQ ID NO: 11444 - RNA, 48 nt, Artificial Sequence
  Description of Artificial Sequence:  Enzymatic Nucleic Acid
cugcauauggaggaaacucccuucaaggacaucguccgggagaagcag

SEQ ID NO: 11445 - RNA, 48 nt, Artificial Sequence
  Description of Artificial Sequence:  Enzymatic Nucleic Acid
gaaaacugggaggaaacucccuucaaggacaucguccgggauaucaga

SEQ ID NO: 11446 - RNA, 48 nt, Artificial Sequence
  Description of Artificial Sequence:  Enzymatic Nucleic Acid
aaggaaaaggaggaaacucccuucaaggacaucguccgggugcauauc

SEQ ID NO: 11447 - RNA, 48 nt, Artificial Sequence
  Description of Artificial Sequence:  Enzymatic Nucleic Acid
uucccuagggaggaaacucccuucaaggacaucguccgggagauuuua

SEQ ID NO: 11448 - RNA, 48 nt, Artificial Sequence
  Description of Artificial Sequence:  Enzymatic Nucleic Acid
gauauuccggaggaaacucccuucaaggacaucguccggguagcagau

SEQ ID NO: 11449 - RNA, 48 nt, Artificial Sequence
  Description of Artificial Sequence:  Enzymatic Nucleic Acid
ugauauucggaggaaacucccuucaaggacaucguccgggcuagcaga

SEQ ID NO: 11450 - RNA, 48 nt, Artificial Sequence
  Description of Artificial Sequence:  Enzymatic Nucleic Acid
uugauauuggaggaaacucccuucaaggacaucguccgggccuagcag

SEQ ID NO: 11451 - RNA, 48 nt, Artificial Sequence
  Description of Artificial Sequence:  Enzymatic Nucleic Acid
guaaauauggaggaaacucccuucaaggacaucguccggguauugaua

SEQ ID NO: 11452 - RNA, 48 nt, Artificial Sequence
  Description of Artificial Sequence:  Enzymatic Nucleic Acid
aaaggaaaggaggaaacucccuucaaggacaucguccgggauuaaaau

SEQ ID NO: 11453 - RNA, 48 nt, Artificial Sequence
  Description of Artificial Sequence:  Enzymatic Nucleic Acid
uguuucugggaggaaacucccuucaaggacaucguccgggagaaagau

SEQ ID NO: 11454 - RNA, 48 nt, Artificial Sequence
  Description of Artificial Sequence:  Enzymatic Nucleic Acid
uucuguuuggaggaaacucccuucaaggacaucguccgggugcagaaa

SEQ ID NO: 11455 - RNA, 48 nt, Artificial Sequence
  Description of Artificial Sequence:  Enzymatic Nucleic Acid
aaaccuuuggaggaaacucccuucaaggacaucguccggguguuucug

SEQ ID NO: 11456 - RNA, 48 nt, Artificial Sequence
  Description of Artificial Sequence:  Enzymatic Nucleic Acid
aagaaaacggaggaaacucccuucaaggacaucguccggguuucuguu

SEQ ID NO: 11457 - RNA, 48 nt, Artificial Sequence
  Description of Artificial Sequence:  Enzymatic Nucleic Acid
gaagaaaaggaggaaacucccuucaaggacaucguccgggcuuucugu

SEQ ID NO: 11458 - RNA, 48 nt, Artificial Sequence
  Description of Artificial Sequence:  Enzymatic Nucleic Acid
uuuugaagggaggaaacucccuucaaggacaucguccgggaaaaagaa

SEQ ID NO: 11459 - RNA, 48 nt, Artificial Sequence
  Description of Artificial Sequence:  Enzymatic Nucleic Acid
agaugagcggaggaaacucccuucaaggacaucguccgggaggaaaaa

SEQ ID NO: 11460 - RNA, 48 nt, Artificial Sequence
  Description of Artificial Sequence:  Enzymatic Nucleic Acid
gagaugagggaggaaacucccuucaaggacaucguccgggcaggaaaa

SEQ ID NO: 11461 - RNA, 48 nt, Artificial Sequence
  Description of Artificial Sequence:  Enzymatic Nucleic Acid
gacucuguggaggaaacucccuucaaggacaucguccggguuuaaaaa

SEQ ID NO: 11462 - RNA, 48 nt, Artificial Sequence
  Description of Artificial Sequence:  Enzymatic Nucleic Acid
gcgagacuggaggaaacucccuucaaggacaucguccgggugucuuua

SEQ ID NO: 11463 - RNA, 48 nt, Artificial Sequence
  Description of Artificial Sequence:  Enzymatic Nucleic Acid
gagcgagaggaggaaacucccuucaaggacaucguccgggucugucuu

SEQ ID NO: 11464 - RNA, 48 nt, Artificial Sequence
  Description of Artificial Sequence:  Enzymatic Nucleic Acid
caacagagggaggaaacucccuucaaggacaucguccggggagacucu

SEQ ID NO: 11465 - RNA, 48 nt, Artificial Sequence
  Description of Artificial Sequence:  Enzymatic Nucleic Acid
cugggcaaggaggaaacucccuucaaggacaucguccgggagagcgag

SEQ ID NO: 11466 - RNA, 48 nt, Artificial Sequence
  Description of Artificial Sequence:  Enzymatic Nucleic Acid
agccugggggaggaaacucccuucaaggacaucguccgggaacagagc

SEQ ID NO: 11467 - RNA, 48 nt, Artificial Sequence
  Description of Artificial Sequence:  Enzymatic Nucleic Acid
acuccagcggaggaaacucccuucaaggacaucguccgggugggcaac

SEQ ID NO: 11468 - RNA, 48 nt, Artificial Sequence
  Description of Artificial Sequence:  Enzymatic Nucleic Acid
cacuccagggaggaaacucccuucaaggacaucguccgggcugggcaa

SEQ ID NO: 11469 - RNA, 48 nt, Artificial Sequence
  Description of Artificial Sequence:  Enzymatic Nucleic Acid
uugcacucggaggaaacucccuucaaggacaucguccgggagccuggg

SEQ ID NO: 11470 - RNA, 48 nt, Artificial Sequence
  Description of Artificial Sequence:  Enzymatic Nucleic Acid
auugcacuggaggaaacucccuucaaggacaucguccgggcagccugg

SEQ ID NO: 11471 - RNA, 48 nt, Artificial Sequence
  Description of Artificial Sequence:  Enzymatic Nucleic Acid
ucauugcaggaggaaacucccuucaaggacaucguccggguccagccu

SEQ ID NO: 11472 - RNA, 48 nt, Artificial Sequence
  Description of Artificial Sequence:  Enzymatic Nucleic Acid
ugucauugggaggaaacucccuucaaggacaucguccgggacuccagc

SEQ ID NO: 11473 - RNA, 48 nt, Artificial Sequence
  Description of Artificial Sequence:  Enzymatic Nucleic Acid
gacuguguggaggaaacucccuucaaggacaucguccgggauugcacu

SEQ ID NO: 11474 - RNA, 48 nt, Artificial Sequence
  Description of Artificial Sequence:  Enzymatic Nucleic Acid
agccaagaggaggaaacucccuucaaggacaucguccgggugugucau

SEQ ID NO: 11475 - RNA, 48 nt, Artificial Sequence
  Description of Artificial Sequence:  Enzymatic Nucleic Acid
cagugagcggaggaaacucccuucaaggacaucguccgggaagacugu

SEQ ID NO: 11476 - RNA, 48 nt, Artificial Sequence
  Description of Artificial Sequence:  Enzymatic Nucleic Acid
gcagugagggaggaaacucccuucaaggacaucguccgggcaagacug

SEQ ID NO: 11477 - RNA, 48 nt, Artificial Sequence
  Description of Artificial Sequence:  Enzymatic Nucleic Acid
agaaguugggaggaaacucccuucaaggacaucguccgggagugagcc

SEQ ID NO: 11478 - RNA, 48 nt, Artificial Sequence
  Description of Artificial Sequence:  Enzymatic Nucleic Acid
ccaagaggggaggaaacucccuucaaggacaucguccgggagaaguug

SEQ ID NO: 11479 - RNA, 48 nt, Artificial Sequence
  Description of Artificial Sequence:  Enzymatic Nucleic Acid
cuugaaccggaggaaacucccuucaaggacaucguccgggaagaggca

SEQ ID NO: 11480 - RNA, 48 nt, Artificial Sequence
  Description of Artificial Sequence:  Enzymatic Nucleic Acid
acuugaacggaggaaacucccuucaaggacaucguccgggcaagaggc

SEQ ID NO: 11481 - RNA, 48 nt, Artificial Sequence
  Description of Artificial Sequence:  Enzymatic Nucleic Acid
cacuugaaggaggaaacucccuucaaggacaucguccgggccaagagg

SEQ ID NO: 11482 - RNA, 48 nt, Artificial Sequence
  Description of Artificial Sequence:  Enzymatic Nucleic Acid
gagaaucaggaggaaacucccuucaaggacaucguccggguugaaccc

SEQ ID NO: 11483 - RNA, 48 nt, Artificial Sequence
  Description of Artificial Sequence:  Enzymatic Nucleic Acid
aggagaauggaggaaacucccuucaaggacaucguccgggacuugaac

SEQ ID NO: 11484 - RNA, 48 nt, Artificial Sequence
  Description of Artificial Sequence:  Enzymatic Nucleic Acid
ggcugaggggaggaaacucccuucaaggacaucguccgggaggagaau

SEQ ID NO: 11485 - RNA, 48 nt, Artificial Sequence
  Description of Artificial Sequence:  Enzymatic Nucleic Acid
ucaggaggggaggaaacucccuucaaggacaucguccgggugaggcag

SEQ ID NO: 11486 - RNA, 48 nt, Artificial Sequence
  Description of Artificial Sequence:  Enzymatic Nucleic Acid
cagcuacuggaggaaacucccuucaaggacaucguccgggaggaggcu

SEQ ID NO: 11487 - RNA, 48 nt, Artificial Sequence
  Description of Artificial Sequence:  Enzymatic Nucleic Acid
uccagcuaggaggaaacucccuucaaggacaucguccgggucaggagg

SEQ ID NO: 11488 - RNA, 48 nt, Artificial Sequence
  Description of Artificial Sequence:  Enzymatic Nucleic Acid
uaauccagggaggaaacucccuucaaggacaucguccggguacucagg

SEQ ID NO: 11489 - RNA, 48 nt, Artificial Sequence
  Description of Artificial Sequence:  Enzymatic Nucleic Acid
cuguaaucggaggaaacucccuucaaggacaucguccgggagcuacuc

SEQ ID NO: 11490 - RNA, 48 nt, Artificial Sequence
  Description of Artificial Sequence:  Enzymatic Nucleic Acid
ccuguaauggaggaaacucccuucaaggacaucguccgggcagcuacu

SEQ ID NO: 11491 - RNA, 48 nt, Artificial Sequence
  Description of Artificial Sequence:  Enzymatic Nucleic Acid
gcacaugcggaggaaacucccuucaaggacaucguccggguguaaucc

SEQ ID NO: 11492 - RNA, 48 nt, Artificial Sequence
  Description of Artificial Sequence:  Enzymatic Nucleic Acid
ggcacaugggaggaaacucccuucaaggacaucguccgggcuguaauc

SEQ ID NO: 11493 - RNA, 48 nt, Artificial Sequence
  Description of Artificial Sequence:  Enzymatic Nucleic Acid
ggguggcaggaggaaacucccuucaaggacaucguccgggaugccugu

SEQ ID NO: 11494 - RNA, 48 nt, Artificial Sequence
  Description of Artificial Sequence:  Enzymatic Nucleic Acid
guggguggggaggaaacucccuucaaggacaucguccgggacaugccu

SEQ ID NO: 11495 - RNA, 48 nt, Artificial Sequence
  Description of Artificial Sequence:  Enzymatic Nucleic Acid
uaaaaacaggaggaaacucccuucaaggacaucguccgggaaaaauua

SEQ ID NO: 11496 - RNA, 48 nt, Artificial Sequence
  Description of Artificial Sequence:  Enzymatic Nucleic Acid
auuaaaaaggaggaaacucccuucaaggacaucguccgggacaaaaau

SEQ ID NO: 11497 - RNA, 48 nt, Artificial Sequence
  Description of Artificial Sequence:  Enzymatic Nucleic Acid
aacccuguggaggaaacucccuucaaggacaucguccggguuuauuaa

SEQ ID NO: 11498 - RNA, 48 nt, Artificial Sequence
  Description of Artificial Sequence:  Enzymatic Nucleic Acid
gugaaaccggaggaaacucccuucaaggacaucguccgggugucuuua

SEQ ID NO: 11499 - RNA, 48 nt, Artificial Sequence
  Description of Artificial Sequence:  Enzymatic Nucleic Acid
ggugaaacggaggaaacucccuucaaggacaucguccgggcugucuuu

SEQ ID NO: 11500 - RNA, 48 nt, Artificial Sequence
  Description of Artificial Sequence:  Enzymatic Nucleic Acid
uggugaaaggaggaaacucccuucaaggacaucguccgggccugucuu

SEQ ID NO: 11501 - RNA, 48 nt, Artificial Sequence
  Description of Artificial Sequence:  Enzymatic Nucleic Acid
cuggccaaggaggaaacucccuucaaggacaucguccgggauggugaa

SEQ ID NO: 11502 - RNA, 48 nt, Artificial Sequence
  Description of Artificial Sequence:  Enzymatic Nucleic Acid
agccuggcggaggaaacucccuucaaggacaucguccgggaacauggu

SEQ ID NO: 11503 - RNA, 48 nt, Artificial Sequence
  Description of Artificial Sequence:  Enzymatic Nucleic Acid
cagccuggggaggaaacucccuucaaggacaucguccgggcaacaugg

SEQ ID NO: 11504 - RNA, 48 nt, Artificial Sequence
  Description of Artificial Sequence:  Enzymatic Nucleic Acid
agaccagcggaggaaacucccuucaaggacaucguccggguggccaac

SEQ ID NO: 11505 - RNA, 48 nt, Artificial Sequence
  Description of Artificial Sequence:  Enzymatic Nucleic Acid
gagaccagggaggaaacucccuucaaggacaucguccgggcuggccaa

SEQ ID NO: 11506 - RNA, 48 nt, Artificial Sequence
  Description of Artificial Sequence:  Enzymatic Nucleic Acid
uuugagacggaggaaacucccuucaaggacaucguccgggagccuggc

SEQ ID NO: 11507 - RNA, 48 nt, Artificial Sequence
  Description of Artificial Sequence:  Enzymatic Nucleic Acid
guuugagaggaggaaacucccuucaaggacaucguccgggcagccugg

SEQ ID NO: 11508 - RNA, 48 nt, Artificial Sequence
  Description of Artificial Sequence:  Enzymatic Nucleic Acid
cuugagguggaggaaacucccuucaaggacaucguccgggaggaguuu

SEQ ID NO: 11509 - RNA, 48 nt, Artificial Sequence
  Description of Artificial Sequence:  Enzymatic Nucleic Acid
guggauuaggaggaaacucccuucaaggacaucguccggguugagguc

SEQ ID NO: 11510 - RNA, 48 nt, Artificial Sequence
  Description of Artificial Sequence:  Enzymatic Nucleic Acid
ggccgaggggaggaaacucccuucaaggacaucguccgggagguggau

SEQ ID NO: 11511 - RNA, 48 nt, Artificial Sequence
  Description of Artificial Sequence:  Enzymatic Nucleic Acid
ugggaggcggaggaaacucccuucaaggacaucguccggggaggcagg

SEQ ID NO: 11512 - RNA, 48 nt, Artificial Sequence
  Description of Artificial Sequence:  Enzymatic Nucleic Acid
uugggaggggaggaaacucccuucaaggacaucguccgggcgaggcag

SEQ ID NO: 11513 - RNA, 48 nt, Artificial Sequence
  Description of Artificial Sequence:  Enzymatic Nucleic Acid
ucccagcaggaggaaacucccuucaaggacaucguccggguuugggag

SEQ ID NO: 11514 - RNA, 48 nt, Artificial Sequence
  Description of Artificial Sequence:  Enzymatic Nucleic Acid
aaucccagggaggaaacucccuucaaggacaucguccgggacuuuggg

SEQ ID NO: 11515 - RNA, 48 nt, Artificial Sequence
  Description of Artificial Sequence:  Enzymatic Nucleic Acid
uguaauccggaggaaacucccuucaaggacaucguccgggagcacuuu

SEQ ID NO: 11516 - RNA, 48 nt, Artificial Sequence
  Description of Artificial Sequence:  Enzymatic Nucleic Acid
cuguaaucggaggaaacucccuucaaggacaucguccgggcagcacuu

SEQ ID NO: 11517 - RNA, 48 nt, Artificial Sequence
  Description of Artificial Sequence:  Enzymatic Nucleic Acid
ccuguaauggaggaaacucccuucaaggacaucguccgggccagcacu

SEQ ID NO: 11518 - RNA, 48 nt, Artificial Sequence
  Description of Artificial Sequence:  Enzymatic Nucleic Acid
gcucauccggaggaaacucccuucaaggacaucguccggguguaaucc

SEQ ID NO: 11519 - RNA, 48 nt, Artificial Sequence
  Description of Artificial Sequence:  Enzymatic Nucleic Acid
ggcucaucggaggaaacucccuucaaggacaucguccgggcuguaauc

SEQ ID NO: 11520 - RNA, 48 nt, Artificial Sequence
  Description of Artificial Sequence:  Enzymatic Nucleic Acid
uggcucauggaggaaacucccuucaaggacaucguccgggccuguaau

SEQ ID NO: 11521 - RNA, 48 nt, Artificial Sequence
  Description of Artificial Sequence:  Enzymatic Nucleic Acid
cgguggcuggaggaaacucccuucaaggacaucguccgggaucccugu

SEQ ID NO: 11522 - RNA, 48 nt, Artificial Sequence
  Description of Artificial Sequence:  Enzymatic Nucleic Acid
cgcgguggggaggaaacucccuucaaggacaucguccgggucaucccu

SEQ ID NO: 11523 - RNA, 48 nt, Artificial Sequence
  Description of Artificial Sequence:  Enzymatic Nucleic Acid
gcugggcgggaggaaacucccuucaaggacaucguccggggguggcuc

SEQ ID NO: 11524 - RNA, 48 nt, Artificial Sequence
  Description of Artificial Sequence:  Enzymatic Nucleic Acid
aggcugggggaggaaacucccuucaaggacaucguccggggcgguggc

SEQ ID NO: 11525 - RNA, 48 nt, Artificial Sequence
  Description of Artificial Sequence:  Enzymatic Nucleic Acid
agaugaggggaggaaacucccuucaaggacaucguccgggugggcgcg

SEQ ID NO: 11526 - RNA, 48 nt, Artificial Sequence
  Description of Artificial Sequence:  Enzymatic Nucleic Acid
cuuuagaaggaggaaacucccuucaaggacaucguccgggaaagagau

SEQ ID NO: 11527 - RNA, 48 nt, Artificial Sequence
  Description of Artificial Sequence:  Enzymatic Nucleic Acid
uuuuccauggaggaaacucccuucaaggacaucguccggguuuagaac

SEQ ID NO: 11528 - RNA, 48 nt, Artificial Sequence
  Description of Artificial Sequence:  Enzymatic Nucleic Acid
gguuuuucggaggaaacucccuucaaggacaucguccgggaucuuuag

SEQ ID NO: 11529 - RNA, 48 nt, Artificial Sequence
  Description of Artificial Sequence:  Enzymatic Nucleic Acid
ugguuuuuggaggaaacucccuucaaggacaucguccgggcaucuuua

SEQ ID NO: 11530 - RNA, 48 nt, Artificial Sequence
  Description of Artificial Sequence:  Enzymatic Nucleic Acid
gauugauuggaggaaacucccuucaaggacaucguccgggauuaauag

SEQ ID NO: 11531 - RNA, 48 nt, Artificial Sequence
  Description of Artificial Sequence:  Enzymatic Nucleic Acid
ccuaaaagggaggaaacucccuucaaggacaucguccggggguagaaa

SEQ ID NO: 11532 - RNA, 48 nt, Artificial Sequence
  Description of Artificial Sequence:  Enzymatic Nucleic Acid
uuuuuggcggaggaaacucccuucaaggacaucguccggguaaaagcg

SEQ ID NO: 11533 - RNA, 48 nt, Artificial Sequence
  Description of Artificial Sequence:  Enzymatic Nucleic Acid
uuuuuuggggaggaaacucccuucaaggacaucguccgggcuaaaagc

SEQ ID NO: 11534 - RNA, 48 nt, Artificial Sequence
  Description of Artificial Sequence:  Enzymatic Nucleic Acid
cgaucuuaggaggaaacucccuucaaggacaucguccgggauuuuuuu

SEQ ID NO: 11535 - RNA, 48 nt, Artificial Sequence
  Description of Artificial Sequence:  Enzymatic Nucleic Acid
agaacgauggaggaaacucccuucaaggacaucguccggguuacauuu

SEQ ID NO: 11536 - RNA, 48 nt, Artificial Sequence
  Description of Artificial Sequence:  Enzymatic Nucleic Acid
gcagagaaggaggaaacucccuucaaggacaucguccggggaucuuac

SEQ ID NO: 11537 - RNA, 48 nt, Artificial Sequence
  Description of Artificial Sequence:  Enzymatic Nucleic Acid
augugaggggaggaaacucccuucaaggacaucguccgggagagaacg

SEQ ID NO: 11538 - RNA, 48 nt, Artificial Sequence
  Description of Artificial Sequence:  Enzymatic Nucleic Acid
cuuguaagggaggaaacucccuucaaggacaucguccggguaugugag

SEQ ID NO: 11539 - RNA, 48 nt, Artificial Sequence
  Description of Artificial Sequence:  Enzymatic Nucleic Acid
ccagcuggggaggaaacucccuucaaggacaucguccggguuguaagc

SEQ ID NO: 11540 - RNA, 48 nt, Artificial Sequence
  Description of Artificial Sequence:  Enzymatic Nucleic Acid
uucuccagggaggaaacucccuucaaggacaucguccggguggcuugu

SEQ ID NO: 11541 - RNA, 48 nt, Artificial Sequence
  Description of Artificial Sequence:  Enzymatic Nucleic Acid
uauuucucggaggaaacucccuucaaggacaucguccgggagcuggcu

SEQ ID NO: 11542 - RNA, 48 nt, Artificial Sequence
  Description of Artificial Sequence:  Enzymatic Nucleic Acid
auauuucuggaggaaacucccuucaaggacaucguccgggcagcuggc

SEQ ID NO: 11543 - RNA, 48 nt, Artificial Sequence
  Description of Artificial Sequence:  Enzymatic Nucleic Acid
ccauauuuggaggaaacucccuucaaggacaucguccggguccagcug

SEQ ID NO: 11544 - RNA, 48 nt, Artificial Sequence
  Description of Artificial Sequence:  Enzymatic Nucleic Acid
augaguacggaggaaacucccuucaaggacaucguccgggauauuucu

SEQ ID NO: 11545 - RNA, 48 nt, Artificial Sequence
  Description of Artificial Sequence:  Enzymatic Nucleic Acid
aaugaguaggaggaaacucccuucaaggacaucguccgggcauauuuc

SEQ ID NO: 11546 - RNA, 48 nt, Artificial Sequence
  Description of Artificial Sequence:  Enzymatic Nucleic Acid
guacaucaggaggaaacucccuucaaggacaucguccggguuuuuuuu

SEQ ID NO: 11547 - RNA, 48 nt, Artificial Sequence
  Description of Artificial Sequence:  Enzymatic Nucleic Acid
uuguacauggaggaaacucccuucaaggacaucguccgggacuuuuuu

SEQ ID NO: 11548 - RNA, 36 nt, Artificial Sequence
  Description of Artificial Sequence:  Enzymatic Nucleic Acid
  misc_feature (1)..(8): 2'-O-Methyl
  misc_feature (12)..(12): 2'-O-Methyl
  misc_feature (14)..(26): 2'-O-Methyl
  misc_feature (28)..(29): 2'-O-Methyl
  misc_feature (31)..(36): 2'-O-Methyl
  misc_feature (1)..(4): Phosphorothioate 3'-Internucleotide Linkage
  misc_feature (9)..(9): 2'-deoxy-2'-C-Allyl
  misc_feature (36)..(36): 3'-3 attached terminal deoxyabasic moeity
aacuugacugaugaggccguuaggccgaaauguaaa

SEQ ID NO: 11549 - RNA, 36 nt, Artificial Sequence
  Description of Artificial Sequence:  Enzymatic Nucleic Acid
  misc_feature (1)..(8): 2'-O-Methyl
  misc_feature (12)..(12): 2'-O-Methyl
  misc_feature (14)..(26): 2'-O-Methyl
  misc_feature (28)..(29): 2'-O-Methyl
  misc_feature (31)..(36): 2'-O-Methyl
  misc_feature (1)..(4): Phosphorothioate 3'-Internucleotide Linkage
  misc_feature (9)..(9): 2'-deoxy-2'-C-Allyl
  misc_feature (36)..(36): 3'-3 attached terminal deoxyabasic moeity
ucuauuacugaugaggccguuaggccgaaaacuuga

SEQ ID NO: 11550 - RNA, 36 nt, Artificial Sequence
  Description of Artificial Sequence:  Enzymatic Nucleic Acid
  misc_feature (1)..(8): 2'-O-Methyl
  misc_feature (12)..(12): 2'-O-Methyl
  misc_feature (14)..(26): 2'-O-Methyl
  misc_feature (28)..(29): 2'-O-Methyl
  misc_feature (31)..(36): 2'-O-Methyl
  misc_feature (1)..(4): Phosphorothioate 3'-Internucleotide Linkage
  misc_feature (9)..(9): 2'-deoxy-2'-C-Allyl
  misc_feature (36)..(36): 3'-3 attached terminal deoxyabasic moeity
aacagcucugaugaggccguuaggccgaaauuuggc

SEQ ID NO: 11551 - RNA, 36 nt, Artificial Sequence
  Description of Artificial Sequence:  Enzymatic Nucleic Acid
  misc_feature (1)..(8): 2'-O-Methyl
  misc_feature (12)..(12): 2'-O-Methyl
  misc_feature (14)..(26): 2'-O-Methyl
  misc_feature (28)..(29): 2'-O-Methyl
  misc_feature (31)..(36): 2'-O-Methyl
  misc_feature (1)..(4): Phosphorothioate 3'-Internucleotide Linkage
  misc_feature (9)..(9): 2'-deoxy-2'-C-Allyl
  misc_feature (36)..(36): 3'-3 attached terminal deoxyabasic moeity
caacagccugaugaggccguuaggccgaaaauuugg

SEQ ID NO: 11552 - RNA, 34 nt, Artificial Sequence
  Description of Artificial Sequence:  Enzymatic Nucleic Acid
  misc_feature (1)..(7): 2'-O-Methyl
  misc_feature (11)..(11): 2'-O-Methyl
  misc_feature (13)..(25): 2'-O-Methyl
  misc_feature (27)..(28): 2'-O-Methyl
  misc_feature (30)..(34): 2'-O-Methyl
  misc_feature (1)..(4): Phosphorothioate 3'-Internucleotide Linkage
  misc_feature (8)..(8): 2'-deoxy-2'-C-Allyl
  misc_feature (34)..(34): 3'-3 attached terminal deoxyabasic moeity
ccaccucugaugaggccguuaggccgaaagccaa

SEQ ID NO: 11553 - RNA, 36 nt, Artificial Sequence
  Description of Artificial Sequence:  Enzymatic Nucleic Acid
  misc_feature (1)..(8): 2'-O-Methyl
  misc_feature (12)..(12): 2'-O-Methyl
  misc_feature (14)..(26): 2'-O-Methyl
  misc_feature (28)..(29): 2'-O-Methyl
  misc_feature (31)..(36): 2'-O-Methyl
  misc_feature (1)..(4): Phosphorothioate 3'-Internucleotide Linkage
  misc_feature (9)..(9): 2'-deoxy-2'-C-Allyl
  misc_feature (36)..(36): 3'-3 attached terminal deoxyabasic moeity
uccaccucugaugaggccguuaggccgaaagccaau

SEQ ID NO: 11554 - RNA, 34 nt, Artificial Sequence
  Description of Artificial Sequence:  Enzymatic Nucleic Acid
  misc_feature (1)..(7): 2'-O-Methyl
  misc_feature (11)..(11): 2'-O-Methyl
  misc_feature (13)..(25): 2'-O-Methyl
  misc_feature (27)..(28): 2'-O-Methyl
  misc_feature (30)..(34): 2'-O-Methyl
  misc_feature (1)..(4): Phosphorothioate 3'-Internucleotide Linkage
  misc_feature (8)..(8): 2'-deoxy-2'-C-Allyl
  misc_feature (34)..(34): 3'-3 attached terminal deoxyabasic moeity
ucacagcugaugaggccguuaggccgaaauucca

SEQ ID NO: 11555 - RNA, 36 nt, Artificial Sequence
  Description of Artificial Sequence:  Enzymatic Nucleic Acid
  misc_feature (1)..(8): 2'-O-Methyl
  misc_feature (12)..(12): 2'-O-Methyl
  misc_feature (14)..(26): 2'-O-Methyl
  misc_feature (28)..(29): 2'-O-Methyl
  misc_feature (31)..(36): 2'-O-Methyl
  misc_feature (1)..(4): Phosphorothioate 3'-Internucleotide Linkage
  misc_feature (9)..(9): 2'-deoxy-2'-C-Allyl
  misc_feature (36)..(36): 3'-3 attached terminal deoxyabasic moeity
aucacagcugaugaggccguuaggccgaaauuccau

SEQ ID NO: 11556 - RNA, 34 nt, Artificial Sequence
  Description of Artificial Sequence:  Enzymatic Nucleic Acid
  misc_feature (1)..(7): 2'-O-Methyl
  misc_feature (11)..(11): 2'-O-Methyl
  misc_feature (13)..(25): 2'-O-Methyl
  misc_feature (27)..(28): 2'-O-Methyl
  misc_feature (30)..(34): 2'-O-Methyl
  misc_feature (1)..(4): Phosphorothioate 3'-Internucleotide Linkage
  misc_feature (8)..(8): 2'-deoxy-2'-C-Allyl
  misc_feature (34)..(34): 3'-3 attached terminal deoxyabasic moeity
gcuuaacugaugaggccguuaggccgaaaucucu

SEQ ID NO: 11557 - RNA, 34 nt, Artificial Sequence
  Description of Artificial Sequence:  Enzymatic Nucleic Acid
  misc_feature (1)..(7): 2'-O-Methyl
  misc_feature (11)..(11): 2'-O-Methyl
  misc_feature (13)..(25): 2'-O-Methyl
  misc_feature (27)..(28): 2'-O-Methyl
  misc_feature (30)..(34): 2'-O-Methyl
  misc_feature (1)..(4): Phosphorothioate 3'-Internucleotide Linkage
  misc_feature (8)..(8): 2'-deoxy-2'-C-Allyl
  misc_feature (34)..(34): 3'-3 attached terminal deoxyabasic moeity
gauugccuagugacgccguuaggcggaaaucguc

SEQ ID NO: 11558 - RNA, 36 nt, Artificial Sequence
  Description of Artificial Sequence:  Enzymatic Nucleic Acid
  misc_feature (1)..(8): 2'-O-Methyl
  misc_feature (12)..(12): 2'-O-Methyl
  misc_feature (14)..(26): 2'-O-Methyl
  misc_feature (28)..(29): 2'-O-Methyl
  misc_feature (31)..(36): 2'-O-Methyl
  misc_feature (1)..(4): Phosphorothioate 3'-Internucleotide Linkage
  misc_feature (9)..(9): 2'-deoxy-2'-C-Allyl
  misc_feature (30)..(30): n stands for inosine
  misc_feature (36)..(36): 3'-3 attached terminal deoxyabasic moeity
gcgaucccuagugaggccguuaggccgaancggugu

SEQ ID NO: 11559 - RNA, 34 nt, Artificial Sequence
  Description of Artificial Sequence:  Enzymatic Nucleic Acid
  misc_feature (1)..(7): 2'-O-Methyl
  misc_feature (11)..(11): 2'-O-Methyl
  misc_feature (13)..(25): 2'-O-Methyl
  misc_feature (27)..(28): 2'-O-Methyl
  misc_feature (30)..(34): 2'-O-Methyl
  misc_feature (1)..(4): Phosphorothioate 3'-Internucleotide Linkage
  misc_feature (8)..(8): 2'-deoxy-2'-C-Allyl
  misc_feature (29)..(29): n stands for inosine
  misc_feature (34)..(34): 3'-3 attached terminal deoxyabasic moeity
uucuuccugaugaggccguuaggccgaanggcaa

SEQ ID NO: 11560 - RNA, 36 nt, Artificial Sequence
  Description of Artificial Sequence:  Enzymatic Nucleic Acid
  misc_feature (1)..(8): 2'-O-Methyl
  misc_feature (12)..(12): 2'-O-Methyl
  misc_feature (14)..(26): 2'-O-Methyl
  misc_feature (28)..(29): 2'-O-Methyl
  misc_feature (31)..(36): 2'-O-Methyl
  misc_feature (1)..(4): Phosphorothioate 3'-Internucleotide Linkage
  misc_feature (9)..(9): 2'-deoxy-2'-C-Allyl
  misc_feature (30)..(30): n stands for inosine
  misc_feature (36)..(36): 3'-3 attached terminal deoxyabasic moeity
uuaucaccugaugaggccguuaggccgaanaauucc

SEQ ID NO: 11561 - RNA, 34 nt, Artificial Sequence
  Description of Artificial Sequence:  Enzymatic Nucleic Acid
  misc_feature (1)..(7): 2'-O-Methyl
  misc_feature (11)..(11): 2'-O-Methyl
  misc_feature (13)..(25): 2'-O-Methyl
  misc_feature (27)..(28): 2'-O-Methyl
  misc_feature (30)..(34): 2'-O-Methyl
  misc_feature (1)..(4): Phosphorothioate 3'-Internucleotide Linkage
  misc_feature (8)..(8): 2'-deoxy-2'-C-Allyl
  misc_feature (29)..(29): n stands for inosine
  misc_feature (34)..(34): 3'-3 attached terminal deoxyabasic moeity
ggcuuacugaugaggccguuaggccgaanaucuc

SEQ ID NO: 11562 - RNA, 36 nt, Artificial Sequence
  Description of Artificial Sequence:  Enzymatic Nucleic Acid
  misc_feature (1)..(8): 2'-O-Methyl
  misc_feature (12)..(12): 2'-O-Methyl
  misc_feature (14)..(26): 2'-O-Methyl
  misc_feature (28)..(29): 2'-O-Methyl
  misc_feature (31)..(36): 2'-O-Methyl
  misc_feature (1)..(4): Phosphorothioate 3'-Internucleotide Linkage
  misc_feature (9)..(9): 2'-deoxy-2'-C-Allyl
  misc_feature (30)..(30): n stands for inosine
  misc_feature (36)..(36): 3'-3 attached terminal deoxyabasic moeity
uggcuuacugaugaggccguuaggccgaanaucucu

SEQ ID NO: 11563 - RNA, 34 nt, Artificial Sequence
  Description of Artificial Sequence:  Enzymatic Nucleic Acid
  misc_feature (1)..(7): 2'-O-Methyl
  misc_feature (11)..(11): 2'-O-Methyl
  misc_feature (13)..(25): 2'-O-Methyl
  misc_feature (27)..(28): 2'-O-Methyl
  misc_feature (30)..(34): 2'-O-Methyl
  misc_feature (1)..(4): Phosphorothioate 3'-Internucleotide Linkage
  misc_feature (8)..(8): 2'-deoxy-2'-C-Allyl
  misc_feature (29)..(29): n stands for inosine
  misc_feature (34)..(34): 3'-3 attached terminal deoxyabasic moeity
cauguacuagugacgccguuaggcggaanccagu

SEQ ID NO: 11564 - RNA, 36 nt, Artificial Sequence
  Description of Artificial Sequence:  Enzymatic Nucleic Acid
  misc_feature (1)..(8): 2'-O-Methyl
  misc_feature (12)..(12): 2'-O-Methyl
  misc_feature (14)..(26): 2'-O-Methyl
  misc_feature (28)..(29): 2'-O-Methyl
  misc_feature (31)..(36): 2'-O-Methyl
  misc_feature (1)..(4): Phosphorothioate 3'-Internucleotide Linkage
  misc_feature (9)..(9): 2'-deoxy-2'-C-Allyl
  misc_feature (30)..(30): n stands for inosine
  misc_feature (36)..(36): 3'-3 attached terminal deoxyabasic moeity
cucauuucuagugacgccguuaggcggaancgaaug

SEQ ID NO: 11565 - RNA, 33 nt, Artificial Sequence
  Description of Artificial Sequence:  Enzymatic Nucleic Acid
  misc_feature (1)..(15): 2'-O-Methyl
  misc_feature (17)..(22): 2'-O-Methyl
  misc_feature (24)..(25): 2'-O-Methyl
  misc_feature (27)..(33): 2'-O-Methyl
  misc_feature (1)..(4): Phosphorothioate 3'-Internucleotide Linkage
  misc_feature (16)..(16): 2'-deoxy-2'-amino
  misc_feature (26)..(26): 2'-deoxy-2'-amino
  misc_feature (33)..(33): 3'-3 attached terminal deoxyabasic moeity
gcuccggccgaaaggcgagugaggucucuucuc

SEQ ID NO: 11566 - RNA, 33 nt, Artificial Sequence
  Description of Artificial Sequence:  Enzymatic Nucleic Acid
  misc_feature (1)..(15): 2'-O-Methyl
  misc_feature (17)..(17): 2'-O-Methyl
  misc_feature (19)..(20): 2'-O-Methyl
  misc_feature (22)..(33): 2'-O-Methyl
  misc_feature (1)..(4): Phosphorothioate 3'-Internucleotide Linkage
  misc_feature (16)..(16): 2'-deoxy-2'-amino
  misc_feature (18)..(18): 2'-deoxy-2'-amino
  misc_feature (33)..(33): 3'-3 attached terminal deoxyabasic moeity
ucuuaagccgaaaggcucuggagugagguacgg

SEQ ID NO: 11567 - RNA, 35 nt, Artificial Sequence
  Description of Artificial Sequence:  Enzymatic Nucleic Acid
  misc_feature (1)..(16): 2'-O-Methyl
  misc_feature (18)..(18): 2'-O-Methyl
  misc_feature (20)..(21): 2'-O-Methyl
  misc_feature (23)..(35): 2'-O-Methyl
  misc_feature (1)..(4): Phosphorothioate 3'-Internucleotide Linkage
  misc_feature (17)..(17): 2'-deoxy-2'-amino
  misc_feature (19)..(19): 2'-deoxy-2'-amino
  misc_feature (35)..(35): 3'-3 attached terminal deoxyabasic moeity
aagguaagccgaaaggcucuggagugagucuucgu

SEQ ID NO: 11568 - RNA, 36 nt, Artificial Sequence
  Description of Artificial Sequence:  Enzymatic Nucleic Acid
  misc_feature (1)..(7): 2'-O-Methyl
  misc_feature (15)..(26): 2'-O-Methyl
  misc_feature (31)..(36): 2'-O-Methyl
  misc_feature (36)..(36): 3'-3 attached terminal deoxyabasic moeity
ccaugcccugaugaggccguuaggccgaaaaccucu

SEQ ID NO: 11569 - RNA, 36 nt, Artificial Sequence
  Description of Artificial Sequence:  Enzymatic Nucleic Acid
  misc_feature (1)..(7): 2'-O-Methyl
  misc_feature (15)..(26): 2'-O-Methyl
  misc_feature (31)..(36): 2'-O-Methyl
  misc_feature (36)..(36): 3'-3 attached terminal deoxyabasic moeity
uuguucccugaugaggccguuaggccgaaagguccc

SEQ ID NO: 11570 - RNA, 36 nt, Artificial Sequence
  Description of Artificial Sequence:  Enzymatic Nucleic Acid
  misc_feature (1)..(7): 2'-O-Methyl
  misc_feature (15)..(26): 2'-O-Methyl
  misc_feature (31)..(36): 2'-O-Methyl
  misc_feature (36)..(36): 3'-3 attached terminal deoxyabasic moeity
guucccucugaugaggccguuaggccgaaacuccuu

SEQ ID NO: 11571 - RNA, 36 nt, Artificial Sequence
  Description of Artificial Sequence:  Enzymatic Nucleic Acid
  misc_feature (1)..(7): 2'-O-Methyl
  misc_feature (15)..(26): 2'-O-Methyl
  misc_feature (31)..(36): 2'-O-Methyl
  misc_feature (36)..(36): 3'-3 attached terminal deoxyabasic moeity
aagagaucugaugaggccguuaggccgaaagccagg

SEQ ID NO: 11572 - RNA, 36 nt, Artificial Sequence
  Description of Artificial Sequence:  Enzymatic Nucleic Acid
  misc_feature (1)..(7): 2'-O-Methyl
  misc_feature (15)..(26): 2'-O-Methyl
  misc_feature (31)..(36): 2'-O-Methyl
  misc_feature (36)..(36): 3'-3 attached terminal deoxyabasic moeity
aggcagacugaugaggccguuaggccgaaaacgauc

SEQ ID NO: 11573 - RNA, 36 nt, Artificial Sequence
  Description of Artificial Sequence:  Enzymatic Nucleic Acid
  misc_feature (1)..(7): 2'-O-Methyl
  misc_feature (15)..(26): 2'-O-Methyl
  misc_feature (31)..(36): 2'-O-Methyl
  misc_feature (30)..(30): n stands for inosine
  misc_feature (36)..(36): 3'-3 attached terminal deoxyabasic moeity
gacagaccugaugaggccguuaggccgaancgagua

SEQ ID NO: 11574 - RNA, 36 nt, Artificial Sequence
  Description of Artificial Sequence:  Enzymatic Nucleic Acid
  misc_feature (1)..(7): 2'-O-Methyl
  misc_feature (15)..(26): 2'-O-Methyl
  misc_feature (31)..(36): 2'-O-Methyl
  misc_feature (30)..(30): n stands for inosine
  misc_feature (36)..(36): 3'-3 attached terminal deoxyabasic moeity
agauggacugaugaggccguuaggccgaanaacugc

SEQ ID NO: 11575 - RNA, 36 nt, Artificial Sequence
  Description of Artificial Sequence:  Enzymatic Nucleic Acid
  misc_feature (1)..(7): 2'-O-Methyl
  misc_feature (15)..(26): 2'-O-Methyl
  misc_feature (31)..(36): 2'-O-Methyl
  misc_feature (30)..(30): n stands for inosine
  misc_feature (36)..(36): 3'-3 attached terminal deoxyabasic moeity
cuguucucugaugaggccguuaggccgaangcucau

SEQ ID NO: 11576 - RNA, 36 nt, Artificial Sequence
  Description of Artificial Sequence:  Enzymatic Nucleic Acid
  misc_feature (1)..(7): 2'-O-Methyl
  misc_feature (15)..(26): 2'-O-Methyl
  misc_feature (31)..(36): 2'-O-Methyl
  misc_feature (30)..(30): n stands for inosine
  misc_feature (36)..(36): 3'-3 attached terminal deoxyabasic moeity
aaagagacugaugaggccguuaggccgaanagccag

SEQ ID NO: 11577 - RNA, 36 nt, Artificial Sequence
  Description of Artificial Sequence:  Enzymatic Nucleic Acid
  misc_feature (1)..(7): 2'-O-Methyl
  misc_feature (15)..(26): 2'-O-Methyl
  misc_feature (31)..(36): 2'-O-Methyl
  misc_feature (30)..(30): n stands for inosine
  misc_feature (36)..(36): 3'-3 attached terminal deoxyabasic moeity
gaggcagcugaugaggccguuaggccgaanaacgau

SEQ ID NO: 11578 - RNA, 35 nt, Artificial Sequence
  Description of Artificial Sequence:  Enzymatic Nucleic Acid
  misc_feature (1)..(16): 2'-O-Methyl
  misc_feature (18)..(23): 2'-O-Methyl
  misc_feature (26)..(26): 2'-O-Methyl
  misc_feature (28)..(35): 2'-O-Methyl
  misc_feature (17)..(17): 2'-deoxy-2'-amino
  misc_feature (27)..(27): 2'-deoxy-2'-amino
  misc_feature (35)..(35): 3'-3 attached terminal deoxyabasic moeity
ugacagagccgaaaggcgagugaggucuagcgagu

SEQ ID NO: 11579 - RNA, 35 nt, Artificial Sequence
  Description of Artificial Sequence:  Enzymatic Nucleic Acid
  misc_feature (1)..(16): 2'-O-Methyl
  misc_feature (18)..(23): 2'-O-Methyl
  misc_feature (26)..(26): 2'-O-Methyl
  misc_feature (28)..(35): 2'-O-Methyl
  misc_feature (17)..(17): 2'-deoxy-2'-amino
  misc_feature (27)..(27): 2'-deoxy-2'-amino
  misc_feature (35)..(35): 3'-3 attached terminal deoxyabasic moeity
gcccauggccgaaaggcgagugaggucuacccccg

SEQ ID NO: 11580 - RNA, 35 nt, Artificial Sequence
  Description of Artificial Sequence:  Enzymatic Nucleic Acid
  misc_feature (1)..(16): 2'-O-Methyl
  misc_feature (18)..(23): 2'-O-Methyl
  misc_feature (26)..(26): 2'-O-Methyl
  misc_feature (28)..(35): 2'-O-Methyl
  misc_feature (17)..(17): 2'-deoxy-2'-amino
  misc_feature (27)..(27): 2'-deoxy-2'-amino
  misc_feature (35)..(35): 3'-3 attached terminal deoxyabasic moeity
uuagcgggccgaaaggcgagugaggucucaauugu

SEQ ID NO: 11581 - RNA, 35 nt, Artificial Sequence
  Description of Artificial Sequence:  Enzymatic Nucleic Acid
  misc_feature (1)..(16): 2'-O-Methyl
  misc_feature (18)..(23): 2'-O-Methyl
  misc_feature (26)..(26): 2'-O-Methyl
  misc_feature (28)..(35): 2'-O-Methyl
  misc_feature (17)..(17): 2'-deoxy-2'-amino
  misc_feature (27)..(27): 2'-deoxy-2'-amino
  misc_feature (35)..(35): 3'-3 attached terminal deoxyabasic moeity
cagaggagccgaaaggcgagugaggucuagguagu

SEQ ID NO: 11582 - RNA, 35 nt, Artificial Sequence
  Description of Artificial Sequence:  Enzymatic Nucleic Acid
  misc_feature (1)..(16): 2'-O-Methyl
  misc_feature (18)..(23): 2'-O-Methyl
  misc_feature (26)..(26): 2'-O-Methyl
  misc_feature (28)..(35): 2'-O-Methyl
  misc_feature (17)..(17): 2'-deoxy-2'-amino
  misc_feature (27)..(27): 2'-deoxy-2'-amino
  misc_feature (35)..(35): 3'-3 attached terminal deoxyabasic moeity
ggacucagccgaaaggcgagugaggucuacguagu

SEQ ID NO: 11583 - DNA, 29 bp, Artificial Sequence
  Description of Artificial Sequence:  Enzymatic Nucleic Acid
  misc_feature (1)..(7): 2'-O-Methyl
  misc_feature (23)..(29): 2'-O-Methyl
  misc_feature (29)..(29): 3'-3 attached terminal deoxyabasic moeity
uccaaaaggctagctacaacgagcacgca

SEQ ID NO: 11584 - DNA, 29 bp, Artificial Sequence
  Description of Artificial Sequence:  Enzymatic Nucleic Acid
  misc_feature (1)..(7): 2'-O-Methyl
  misc_feature (23)..(29): 2'-O-Methyl
  misc_feature (29)..(29): 3'-3 attached terminal deoxyabasic moeity
cagaggaggctagctacaacgaagguagu

SEQ ID NO: 11585 - DNA, 29 bp, Artificial Sequence
  Description of Artificial Sequence:  Enzymatic Nucleic Acid
  misc_feature (1)..(7): 2'-O-Methyl
  misc_feature (23)..(29): 2'-O-Methyl
  misc_feature (29)..(29): 3'-3 attached terminal deoxyabasic moeity
caauccaggctagctacaacgauguucca

SEQ ID NO: 11586 - DNA, 29 bp, Artificial Sequence
  Description of Artificial Sequence:  Enzymatic Nucleic Acid
  misc_feature (1)..(7): 2'-O-Methyl
  misc_feature (23)..(29): 2'-O-Methyl
  misc_feature (29)..(29): 3'-3 attached terminal deoxyabasic moeity
aaagagaggctagctacaacgagagccag

SEQ ID NO: 11587 - DNA, 29 bp, Artificial Sequence
  Description of Artificial Sequence:  Enzymatic Nucleic Acid
  misc_feature (1)..(7): 2'-O-Methyl
  misc_feature (23)..(29): 2'-O-Methyl
  misc_feature (29)..(29): 3'-3 attached terminal deoxyabasic moeity
agguggaggctagctacaacgauacuuga

SEQ ID NO: 11588 - RNA, 46 nt, Artificial Sequence
  Description of Artificial Sequence:  Enzymatic Nucleic Acid
  misc_feature (1)..(7): 2'-O-Methyl
  misc_feature (9)..(18): 2'-O-Methyl
  misc_feature (24)..(35): 2'-O-Methyl
  misc_feature (40)..(46): 2'-O-Methyl
  misc_feature (19)..(23): 2'-deoxy-2'-amino
  misc_feature (36)..(36): 2'-deoxy-2'-amino
  misc_feature (46)..(46): 3'-3 attached terminal deoxyabasic moeity
gaucuacggaggaaacucccuucaaggacaucguccggguucaccu

SEQ ID NO: 11589 - RNA, 46 nt, Artificial Sequence
  Description of Artificial Sequence:  Enzymatic Nucleic Acid
  misc_feature (1)..(7): 2'-O-Methyl
  misc_feature (9)..(18): 2'-O-Methyl
  misc_feature (24)..(35): 2'-O-Methyl
  misc_feature (40)..(46): 2'-O-Methyl
  misc_feature (19)..(23): 2'-deoxy-2'-amino
  misc_feature (36)..(36): 2'-deoxy-2'-amino
  misc_feature (46)..(46): 3'-3 attached terminal deoxyabasic moeity
uagcggcggaggaaacucccuucaaggacaucguccgggaauuguu

SEQ ID NO: 11590 - RNA, 46 nt, Artificial Sequence
  Description of Artificial Sequence:  Enzymatic Nucleic Acid
  misc_feature (1)..(7): 2'-O-Methyl
  misc_feature (9)..(18): 2'-O-Methyl
  misc_feature (24)..(35): 2'-O-Methyl
  misc_feature (40)..(46): 2'-O-Methyl
  misc_feature (19)..(23): 2'-deoxy-2'-amino
  misc_feature (36)..(36): 2'-deoxy-2'-amino
  misc_feature (46)..(46): 3'-3 attached terminal deoxyabasic moeity
cagaggaggaggaaacucccuucaaggacaucguccgggagguagu

SEQ ID NO: 11591 - RNA, 46 nt, Artificial Sequence
  Description of Artificial Sequence:  Enzymatic Nucleic Acid
  misc_feature (1)..(7): 2'-O-Methyl
  misc_feature (9)..(18): 2'-O-Methyl
  misc_feature (24)..(35): 2'-O-Methyl
  misc_feature (40)..(46): 2'-O-Methyl
  misc_feature (19)..(23): 2'-deoxy-2'-amino
  misc_feature (36)..(36): 2'-deoxy-2'-amino
  misc_feature (46)..(46): 3'-3 attached terminal deoxyabasic moeity
uucauguggaggaaacucccuucaaggacaucguccgggaggaagg

SEQ ID NO: 11592 - RNA, 46 nt, Artificial Sequence
  Description of Artificial Sequence:  Enzymatic Nucleic Acid
  misc_feature (1)..(7): 2'-O-Methyl
  misc_feature (9)..(18): 2'-O-Methyl
  misc_feature (24)..(35): 2'-O-Methyl
  misc_feature (40)..(46): 2'-O-Methyl
  misc_feature (19)..(23): 2'-deoxy-2'-amino
  misc_feature (36)..(36): 2'-deoxy-2'-amino
  misc_feature (46)..(46): 3'-3 attached terminal deoxyabasic moeity
gaugagcggaggaaacucccuucaaggacaucguccgggaggaaaa

SEQ ID NO: 11593 - RNA, 36 nt, Artificial Sequence
  Description of Artificial Sequence:  Enzymatic Nucleic Acid
  misc_feature (1)..(8): 2'-O-Methyl
  misc_feature (12)..(12): 2'-O-Methyl
  misc_feature (14)..(26): 2'-O-Methyl
  misc_feature (28)..(29): 2'-O-Methyl
  misc_feature (31)..(36): 2'-O-Methyl
  misc_feature (1)..(4): Phosphorothioate 3'-Internucleotide Linkage
  misc_feature (9)..(9): 2'-deoxy-2'-C-Allyl
  misc_feature (36)..(36): 3'-3 attached terminal deoxyabasic moeity
ugcacaucugaugaggccguuaggccgaaaggaacu

SEQ ID NO: 11594 - RNA, 34 nt, Artificial Sequence
  Description of Artificial Sequence:  Enzymatic Nucleic Acid
  misc_feature (1)..(7): 2'-O-Methyl
  misc_feature (11)..(11): 2'-O-Methyl
  misc_feature (13)..(25): 2'-O-Methyl
  misc_feature (27)..(28): 2'-O-Methyl
  misc_feature (30)..(34): 2'-O-Methyl
  misc_feature (1)..(4): Phosphorothioate 3'-Internucleotide Linkage
  misc_feature (8)..(8): 2'-deoxy-2'-C-Allyl
  misc_feature (34)..(34): 3'-3 attached terminal deoxyabasic moeity
uguagacugaugaggccguuaggccgaaauccgc

SEQ ID NO: 11595 - RNA, 36 nt, Artificial Sequence
  Description of Artificial Sequence:  Enzymatic Nucleic Acid
  misc_feature (1)..(8): 2'-O-Methyl
  misc_feature (12)..(12): 2'-O-Methyl
  misc_feature (14)..(26): 2'-O-Methyl
  misc_feature (28)..(29): 2'-O-Methyl
  misc_feature (31)..(36): 2'-O-Methyl
  misc_feature (1)..(4): Phosphorothioate 3'-Internucleotide Linkage
  misc_feature (9)..(9): 2'-deoxy-2'-C-Allyl
  misc_feature (36)..(36): 3'-3 attached terminal deoxyabasic moeity
uuguagacugaugaggccguuaggccgaaauccgcc

SEQ ID NO: 11596 - RNA, 36 nt, Artificial Sequence
  Description of Artificial Sequence:  Enzymatic Nucleic Acid
  misc_feature (1)..(8): 2'-O-Methyl
  misc_feature (12)..(12): 2'-O-Methyl
  misc_feature (14)..(26): 2'-O-Methyl
  misc_feature (28)..(29): 2'-O-Methyl
  misc_feature (31)..(36): 2'-O-Methyl
  misc_feature (1)..(4): Phosphorothioate 3'-Internucleotide Linkage
  misc_feature (9)..(9): 2'-deoxy-2'-C-Allyl
  misc_feature (36)..(36): 3'-3 attached terminal deoxyabasic moeity
ccuuguacugaugaggccguuaggccgaaauauccg

SEQ ID NO: 11597 - RNA, 34 nt, Artificial Sequence
  Description of Artificial Sequence:  Enzymatic Nucleic Acid
  misc_feature (1)..(7): 2'-O-Methyl
  misc_feature (11)..(11): 2'-O-Methyl
  misc_feature (13)..(25): 2'-O-Methyl
  misc_feature (27)..(28): 2'-O-Methyl
  misc_feature (30)..(34): 2'-O-Methyl
  misc_feature (1)..(4): Phosphorothioate 3'-Internucleotide Linkage
  misc_feature (8)..(8): 2'-deoxy-2'-C-Allyl
  misc_feature (34)..(34): 3'-3 attached terminal deoxyabasic moeity
gccuugcugaugaggccguuaggccgaaagauau

SEQ ID NO: 11598 - RNA, 36 nt, Artificial Sequence
  Description of Artificial Sequence:  Enzymatic Nucleic Acid
  misc_feature (1)..(8): 2'-O-Methyl
  misc_feature (12)..(12): 2'-O-Methyl
  misc_feature (14)..(26): 2'-O-Methyl
  misc_feature (28)..(29): 2'-O-Methyl
  misc_feature (31)..(36): 2'-O-Methyl
  misc_feature (1)..(4): Phosphorothioate 3'-Internucleotide Linkage
  misc_feature (9)..(9): 2'-deoxy-2'-C-Allyl
  misc_feature (36)..(36): 3'-3 attached terminal deoxyabasic moeity
acuccaucugaugaggccguuaggccgaaacaugua

SEQ ID NO: 11599 - RNA, 36 nt, Artificial Sequence
  Description of Artificial Sequence:  Enzymatic Nucleic Acid
  misc_feature (1)..(8): 2'-O-Methyl
  misc_feature (12)..(12): 2'-O-Methyl
  misc_feature (14)..(26): 2'-O-Methyl
  misc_feature (28)..(29): 2'-O-Methyl
  misc_feature (31)..(36): 2'-O-Methyl
  misc_feature (1)..(4): Phosphorothioate 3'-Internucleotide Linkage
  misc_feature (9)..(9): 2'-deoxy-2'-C-Allyl
  misc_feature (36)..(36): 3'-3 attached terminal deoxyabasic moeity
ccuacuccugaugaggccguuaggccgaaaugcacu

SEQ ID NO: 11600 - RNA, 34 nt, Artificial Sequence
  Description of Artificial Sequence:  Enzymatic Nucleic Acid
  misc_feature (1)..(7): 2'-O-Methyl
  misc_feature (11)..(11): 2'-O-Methyl
  misc_feature (13)..(25): 2'-O-Methyl
  misc_feature (27)..(28): 2'-O-Methyl
  misc_feature (30)..(34): 2'-O-Methyl
  misc_feature (1)..(4): Phosphorothioate 3'-Internucleotide Linkage
  misc_feature (8)..(8): 2'-deoxy-2'-C-Allyl
  misc_feature (34)..(34): 3'-3 attached terminal deoxyabasic moeity
agcucccuagugacgccguuaggcggaaagucgu

SEQ ID NO: 11601 - RNA, 36 nt, Artificial Sequence
  Description of Artificial Sequence:  Enzymatic Nucleic Acid
  misc_feature (1)..(8): 2'-O-Methyl
  misc_feature (12)..(12): 2'-O-Methyl
  misc_feature (14)..(26): 2'-O-Methyl
  misc_feature (28)..(29): 2'-O-Methyl
  misc_feature (31)..(36): 2'-O-Methyl
  misc_feature (1)..(4): Phosphorothioate 3'-Internucleotide Linkage
  misc_feature (9)..(9): 2'-deoxy-2'-C-Allyl
  misc_feature (36)..(36): 3'-3 attached terminal deoxyabasic moeity
gucgccucuagugacgccguuaggcggaaacucaga

SEQ ID NO: 11602 - RNA, 34 nt, Artificial Sequence
  Description of Artificial Sequence:  Enzymatic Nucleic Acid
  misc_feature (1)..(7): 2'-O-Methyl
  misc_feature (11)..(11): 2'-O-Methyl
  misc_feature (13)..(25): 2'-O-Methyl
  misc_feature (27)..(28): 2'-O-Methyl
  misc_feature (30)..(34): 2'-O-Methyl
  misc_feature (8)..(8): 2'-deoxy-2'-C-Allyl
  misc_feature (29)..(29): n stands for inosine
  misc_feature (34)..(34): 3'-3 attached terminal deoxyabasic moeity
ccacugcugaugaggccguuaggccgaancugca

SEQ ID NO: 11603 - RNA, 34 nt, Artificial Sequence
  Description of Artificial Sequence:  Enzymatic Nucleic Acid
  misc_feature (1)..(7): 2'-O-Methyl
  misc_feature (11)..(11): 2'-O-Methyl
  misc_feature (13)..(25): 2'-O-Methyl
  misc_feature (27)..(28): 2'-O-Methyl
  misc_feature (30)..(34): 2'-O-Methyl
  misc_feature (8)..(8): 2'-deoxy-2'-C-Allyl
  misc_feature (29)..(29): n stands for inosine
  misc_feature (34)..(34): 3'-3 attached terminal deoxyabasic moeity
accacucugaugaggccguuaggccgaangcugc

SEQ ID NO: 11604 - RNA, 34 nt, Artificial Sequence
  Description of Artificial Sequence:  Enzymatic Nucleic Acid
  misc_feature (1)..(7): 2'-O-Methyl
  misc_feature (11)..(11): 2'-O-Methyl
  misc_feature (13)..(25): 2'-O-Methyl
  misc_feature (27)..(28): 2'-O-Methyl
  misc_feature (30)..(34): 2'-O-Methyl
  misc_feature (8)..(8): 2'-deoxy-2'-C-Allyl
  misc_feature (29)..(29): n stands for inosine
  misc_feature (34)..(34): 3'-3 attached terminal deoxyabasic moeity
cagcgccugaugaggccguuaggccgaangaggg

SEQ ID NO: 11605 - RNA, 34 nt, Artificial Sequence
  Description of Artificial Sequence:  Enzymatic Nucleic Acid
  misc_feature (1)..(7): 2'-O-Methyl
  misc_feature (11)..(11): 2'-O-Methyl
  misc_feature (13)..(25): 2'-O-Methyl
  misc_feature (27)..(28): 2'-O-Methyl
  misc_feature (30)..(34): 2'-O-Methyl
  misc_feature (8)..(8): 2'-deoxy-2'-C-Allyl
  misc_feature (29)..(29): n stands for inosine
  misc_feature (34)..(34): 3'-3 attached terminal deoxyabasic moeity
agcucucugaugaggccguuaggccgaanauucu

SEQ ID NO: 11606 - RNA, 36 nt, Artificial Sequence
  Description of Artificial Sequence:  Enzymatic Nucleic Acid
  misc_feature (1)..(8): 2'-O-Methyl
  misc_feature (12)..(12): 2'-O-Methyl
  misc_feature (14)..(26): 2'-O-Methyl
  misc_feature (28)..(29): 2'-O-Methyl
  misc_feature (31)..(36): 2'-O-Methyl
  misc_feature (9)..(9): 2'-deoxy-2'-C-Allyl
  misc_feature (30)..(30): n stands for inosine
  misc_feature (36)..(36): 3'-3 attached terminal deoxyabasic moeity
gagcucucugaugaggccguuaggccgaanauucuc

SEQ ID NO: 11607 - RNA, 34 nt, Artificial Sequence
  Description of Artificial Sequence:  Enzymatic Nucleic Acid
  misc_feature (1)..(7): 2'-O-Methyl
  misc_feature (11)..(11): 2'-O-Methyl
  misc_feature (13)..(25): 2'-O-Methyl
  misc_feature (27)..(28): 2'-O-Methyl
  misc_feature (30)..(34): 2'-O-Methyl
  misc_feature (8)..(8): 2'-deoxy-2'-C-Allyl
  misc_feature (29)..(29): n stands for inosine
  misc_feature (34)..(34): 3'-3 attached terminal deoxyabasic moeity
guccuccugaugaggccguuaggccgaanccauc

SEQ ID NO: 11608 - RNA, 36 nt, Artificial Sequence
  Description of Artificial Sequence:  Enzymatic Nucleic Acid
  misc_feature (1)..(8): 2'-O-Methyl
  misc_feature (12)..(12): 2'-O-Methyl
  misc_feature (14)..(26): 2'-O-Methyl
  misc_feature (28)..(29): 2'-O-Methyl
  misc_feature (31)..(36): 2'-O-Methyl
  misc_feature (9)..(9): 2'-deoxy-2'-C-Allyl
  misc_feature (30)..(30): n stands for inosine
  misc_feature (36)..(36): 3'-3 attached terminal deoxyabasic moeity
uguccuccugaugaggccguuaggccgaanccaucu

SEQ ID NO: 11609 - RNA, 36 nt, Artificial Sequence
  Description of Artificial Sequence:  Enzymatic Nucleic Acid
  misc_feature (1)..(8): 2'-O-Methyl
  misc_feature (12)..(12): 2'-O-Methyl
  misc_feature (14)..(26): 2'-O-Methyl
  misc_feature (28)..(29): 2'-O-Methyl
  misc_feature (31)..(36): 2'-O-Methyl
  misc_feature (9)..(9): 2'-deoxy-2'-C-Allyl
  misc_feature (30)..(30): n stands for inosine
  misc_feature (36)..(36): 3'-3 attached terminal deoxyabasic moeity
ucacagacugaugaggccguuaggccgaanccuugu

SEQ ID NO: 11610 - RNA, 34 nt, Artificial Sequence
  Description of Artificial Sequence:  Enzymatic Nucleic Acid
  misc_feature (1)..(7): 2'-O-Methyl
  misc_feature (11)..(11): 2'-O-Methyl
  misc_feature (13)..(25): 2'-O-Methyl
  misc_feature (27)..(28): 2'-O-Methyl
  misc_feature (30)..(34): 2'-O-Methyl
  misc_feature (8)..(8): 2'-deoxy-2'-C-Allyl
  misc_feature (29)..(29): n stands for inosine
  misc_feature (34)..(34): 3'-3 attached terminal deoxyabasic moeity
uuucaccugaugaggccguuaggccgaanaggcc

SEQ ID NO: 11611 - RNA, 36 nt, Artificial Sequence
  Description of Artificial Sequence:  Enzymatic Nucleic Acid
  misc_feature (1)..(8): 2'-O-Methyl
  misc_feature (12)..(12): 2'-O-Methyl
  misc_feature (14)..(26): 2'-O-Methyl
  misc_feature (28)..(29): 2'-O-Methyl
  misc_feature (31)..(36): 2'-O-Methyl
  misc_feature (9)..(9): 2'-deoxy-2'-C-Allyl
  misc_feature (30)..(30): n stands for inosine
  misc_feature (36)..(36): 3'-3 attached terminal deoxyabasic moeity
ucaccugcugaugaggccguuaggccgaancuuuca

SEQ ID NO: 11612 - RNA, 34 nt, Artificial Sequence
  Description of Artificial Sequence:  Enzymatic Nucleic Acid
  misc_feature (1)..(7): 2'-O-Methyl
  misc_feature (11)..(11): 2'-O-Methyl
  misc_feature (13)..(25): 2'-O-Methyl
  misc_feature (27)..(28): 2'-O-Methyl
  misc_feature (30)..(34): 2'-O-Methyl
  misc_feature (8)..(8): 2'-deoxy-2'-C-Allyl
  misc_feature (29)..(29): n stands for inosine
  misc_feature (34)..(34): 3'-3 attached terminal deoxyabasic moeity
gcagcucugaugaggccguuaggccgaanuccac

SEQ ID NO: 11613 - RNA, 34 nt, Artificial Sequence
  Description of Artificial Sequence:  Enzymatic Nucleic Acid
  misc_feature (1)..(7): 2'-O-Methyl
  misc_feature (11)..(11): 2'-O-Methyl
  misc_feature (13)..(25): 2'-O-Methyl
  misc_feature (27)..(28): 2'-O-Methyl
  misc_feature (30)..(34): 2'-O-Methyl
  misc_feature (8)..(8): 2'-deoxy-2'-C-Allyl
  misc_feature (29)..(29): n stands for inosine
  misc_feature (34)..(34): 3'-3 attached terminal deoxyabasic moeity
ucuucccugaugaggccguuaggccgaancugca

SEQ ID NO: 11614 - RNA, 36 nt, Artificial Sequence
  Description of Artificial Sequence:  Enzymatic Nucleic Acid
  misc_feature (1)..(8): 2'-O-Methyl
  misc_feature (12)..(12): 2'-O-Methyl
  misc_feature (14)..(26): 2'-O-Methyl
  misc_feature (28)..(29): 2'-O-Methyl
  misc_feature (31)..(36): 2'-O-Methyl
  misc_feature (9)..(9): 2'-deoxy-2'-C-Allyl
  misc_feature (30)..(30): n stands for inosine
  misc_feature (36)..(36): 3'-3 attached terminal deoxyabasic moeity
aucuucccugaugaggccguuaggccgaancugcau

SEQ ID NO: 11615 - RNA, 34 nt, Artificial Sequence
  Description of Artificial Sequence:  Enzymatic Nucleic Acid
  misc_feature (1)..(7): 2'-O-Methyl
  misc_feature (11)..(11): 2'-O-Methyl
  misc_feature (13)..(25): 2'-O-Methyl
  misc_feature (27)..(28): 2'-O-Methyl
  misc_feature (30)..(34): 2'-O-Methyl
  misc_feature (8)..(8): 2'-deoxy-2'-C-Allyl
  misc_feature (29)..(29): n stands for inosine
  misc_feature (34)..(34): 3'-3 attached terminal deoxyabasic moeity
cugcuccugaugaggccguuaggccgaanccucc

SEQ ID NO: 11616 - RNA, 36 nt, Artificial Sequence
  Description of Artificial Sequence:  Enzymatic Nucleic Acid
  misc_feature (1)..(8): 2'-O-Methyl
  misc_feature (12)..(12): 2'-O-Methyl
  misc_feature (14)..(26): 2'-O-Methyl
  misc_feature (28)..(29): 2'-O-Methyl
  misc_feature (31)..(36): 2'-O-Methyl
  misc_feature (9)..(9): 2'-deoxy-2'-C-Allyl
  misc_feature (30)..(30): n stands for inosine
  misc_feature (36)..(36): 3'-3 attached terminal deoxyabasic moeity
gcugcuccugaugaggccguuaggccgaanccuccu

SEQ ID NO: 11617 - RNA, 34 nt, Artificial Sequence
  Description of Artificial Sequence:  Enzymatic Nucleic Acid
  misc_feature (1)..(7): 2'-O-Methyl
  misc_feature (11)..(11): 2'-O-Methyl
  misc_feature (13)..(25): 2'-O-Methyl
  misc_feature (27)..(28): 2'-O-Methyl
  misc_feature (30)..(34): 2'-O-Methyl
  misc_feature (8)..(8): 2'-deoxy-2'-C-Allyl
  misc_feature (29)..(29): n stands for inosine
  misc_feature (34)..(34): 3'-3 attached terminal deoxyabasic moeity
aucuugcugaugaggccguuaggccgaancugcu

SEQ ID NO: 11618 - RNA, 36 nt, Artificial Sequence
  Description of Artificial Sequence:  Enzymatic Nucleic Acid
  misc_feature (1)..(8): 2'-O-Methyl
  misc_feature (12)..(12): 2'-O-Methyl
  misc_feature (14)..(26): 2'-O-Methyl
  misc_feature (28)..(29): 2'-O-Methyl
  misc_feature (31)..(36): 2'-O-Methyl
  misc_feature (9)..(9): 2'-deoxy-2'-C-Allyl
  misc_feature (30)..(30): n stands for inosine
  misc_feature (36)..(36): 3'-3 attached terminal deoxyabasic moeity
aaucuugcugaugaggccguuaggccgaancugcuc

SEQ ID NO: 11619 - RNA, 36 nt, Artificial Sequence
  Description of Artificial Sequence:  Enzymatic Nucleic Acid
  misc_feature (1)..(8): 2'-O-Methyl
  misc_feature (12)..(12): 2'-O-Methyl
  misc_feature (14)..(26): 2'-O-Methyl
  misc_feature (28)..(29): 2'-O-Methyl
  misc_feature (31)..(36): 2'-O-Methyl
  misc_feature (9)..(9): 2'-deoxy-2'-C-Allyl
  misc_feature (30)..(30): n stands for inosine
  misc_feature (36)..(36): 3'-3 attached terminal deoxyabasic moeity
acaaucucugaugaggccguuaggccgaanugcugc

SEQ ID NO: 11620 - RNA, 36 nt, Artificial Sequence
  Description of Artificial Sequence:  Enzymatic Nucleic Acid
  misc_feature (1)..(8): 2'-O-Methyl
  misc_feature (12)..(12): 2'-O-Methyl
  misc_feature (14)..(26): 2'-O-Methyl
  misc_feature (28)..(29): 2'-O-Methyl
  misc_feature (31)..(36): 2'-O-Methyl
  misc_feature (9)..(9): 2'-deoxy-2'-C-Allyl
  misc_feature (30)..(30): n stands for inosine
  misc_feature (36)..(36): 3'-3 attached terminal deoxyabasic moeity
gccuugucugaugaggccguuaggccgaanauaucc

SEQ ID NO: 11621 - RNA, 34 nt, Artificial Sequence
  Description of Artificial Sequence:  Enzymatic Nucleic Acid
  misc_feature (1)..(7): 2'-O-Methyl
  misc_feature (11)..(11): 2'-O-Methyl
  misc_feature (13)..(25): 2'-O-Methyl
  misc_feature (27)..(28): 2'-O-Methyl
  misc_feature (30)..(34): 2'-O-Methyl
  misc_feature (8)..(8): 2'-deoxy-2'-C-Allyl
  misc_feature (29)..(29): n stands for inosine
  misc_feature (34)..(34): 3'-3 attached terminal deoxyabasic moeity
uccagccugaugaggccguuaggccgaancuccu

SEQ ID NO: 11622 - RNA, 36 nt, Artificial Sequence
  Description of Artificial Sequence:  Enzymatic Nucleic Acid
  misc_feature (1)..(8): 2'-O-Methyl
  misc_feature (12)..(12): 2'-O-Methyl
  misc_feature (14)..(26): 2'-O-Methyl
  misc_feature (28)..(29): 2'-O-Methyl
  misc_feature (31)..(36): 2'-O-Methyl
  misc_feature (9)..(9): 2'-deoxy-2'-C-Allyl
  misc_feature (30)..(30): n stands for inosine
  misc_feature (36)..(36): 3'-3 attached terminal deoxyabasic moeity
cugauaccugaugaggccguuaggccgaangcacuu

SEQ ID NO: 11623 - RNA, 34 nt, Artificial Sequence
  Description of Artificial Sequence:  Enzymatic Nucleic Acid
  misc_feature (1)..(7): 2'-O-Methyl
  misc_feature (11)..(11): 2'-O-Methyl
  misc_feature (13)..(25): 2'-O-Methyl
  misc_feature (27)..(28): 2'-O-Methyl
  misc_feature (30)..(34): 2'-O-Methyl
  misc_feature (8)..(8): 2'-deoxy-2'-C-Allyl
  misc_feature (29)..(29): n stands for inosine
  misc_feature (34)..(34): 3'-3 attached terminal deoxyabasic moeity
acuccacugaugaggccguuaggccgaanacaug

SEQ ID NO: 11624 - RNA, 36 nt, Artificial Sequence
  Description of Artificial Sequence:  Enzymatic Nucleic Acid
  misc_feature (1)..(8): 2'-O-Methyl
  misc_feature (12)..(12): 2'-O-Methyl
  misc_feature (14)..(26): 2'-O-Methyl
  misc_feature (28)..(29): 2'-O-Methyl
  misc_feature (31)..(36): 2'-O-Methyl
  misc_feature (9)..(9): 2'-deoxy-2'-C-Allyl
  misc_feature (30)..(30): n stands for inosine
  misc_feature (36)..(36): 3'-3 attached terminal deoxyabasic moeity
cacuccacugaugaggccguuaggccgaanacaugu

SEQ ID NO: 11625 - RNA, 34 nt, Artificial Sequence
  Description of Artificial Sequence:  Enzymatic Nucleic Acid
  misc_feature (1)..(7): 2'-O-Methyl
  misc_feature (11)..(11): 2'-O-Methyl
  misc_feature (13)..(25): 2'-O-Methyl
  misc_feature (27)..(28): 2'-O-Methyl
  misc_feature (30)..(34): 2'-O-Methyl
  misc_feature (8)..(8): 2'-deoxy-2'-C-Allyl
  misc_feature (29)..(29): n stands for inosine
  misc_feature (34)..(34): 3'-3 attached terminal deoxyabasic moeity
uuccgccuagugacgccguuaggcggaanacgug

SEQ ID NO: 11626 - RNA, 36 nt, Artificial Sequence
  Description of Artificial Sequence:  Enzymatic Nucleic Acid
  misc_feature (1)..(8): 2'-O-Methyl
  misc_feature (12)..(12): 2'-O-Methyl
  misc_feature (14)..(26): 2'-O-Methyl
  misc_feature (28)..(29): 2'-O-Methyl
  misc_feature (31)..(36): 2'-O-Methyl
  misc_feature (9)..(9): 2'-deoxy-2'-C-Allyl
  misc_feature (30)..(30): n stands for inosine
  misc_feature (36)..(36): 3'-3 attached terminal deoxyabasic moeity
cagaccucuagugacgccguuaggcggaanuuccga

SEQ ID NO: 11627 - RNA, 35 nt, Artificial Sequence
  Description of Artificial Sequence:  Enzymatic Nucleic Acid
  misc_feature (1)..(16): 2'-O-Methyl
  misc_feature (18)..(23): 2'-O-Methyl
  misc_feature (25)..(26): 2'-O-Methyl
  misc_feature (28)..(35): 2'-O-Methyl
  misc_feature (1)..(4): Phosphorothioate 3'-Internucleotide Linkage
  misc_feature (17)..(17): 2'-deoxy-2'-amino
  misc_feature (27)..(27): 2'-deoxy-2'-amino
  misc_feature (35)..(35): 3'-3 attached terminal deoxyabasic moeity
ggcagcggccgaaaggcgagugaggucuuggaggg

SEQ ID NO: 11628 - RNA, 35 nt, Artificial Sequence
  Description of Artificial Sequence:  Enzymatic Nucleic Acid
  misc_feature (1)..(16): 2'-O-Methyl
  misc_feature (18)..(23): 2'-O-Methyl
  misc_feature (25)..(26): 2'-O-Methyl
  misc_feature (28)..(35): 2'-O-Methyl
  misc_feature (1)..(4): Phosphorothioate 3'-Internucleotide Linkage
  misc_feature (17)..(17): 2'-deoxy-2'-amino
  misc_feature (27)..(27): 2'-deoxy-2'-amino
  misc_feature (35)..(35): 3'-3 attached terminal deoxyabasic moeity
caggcaggccgaaaggcgagugaggucugcuggag

SEQ ID NO: 11629 - RNA, 33 nt, Artificial Sequence
  Description of Artificial Sequence:  Enzymatic Nucleic Acid
  misc_feature (1)..(15): 2'-O-Methyl
  misc_feature (17)..(22): 2'-O-Methyl
  misc_feature (24)..(25): 2'-O-Methyl
  misc_feature (27)..(33): 2'-O-Methyl
  misc_feature (1)..(4): Phosphorothioate 3'-Internucleotide Linkage
  misc_feature (16)..(16): 2'-deoxy-2'-amino
  misc_feature (26)..(26): 2'-deoxy-2'-amino
  misc_feature (33)..(33): 3'-3 attached terminal deoxyabasic moeity
uccagggccgaaaggcgagugaggucuagcgcu

SEQ ID NO: 11630 - RNA, 33 nt, Artificial Sequence
  Description of Artificial Sequence:  Enzymatic Nucleic Acid
  misc_feature (1)..(15): 2'-O-Methyl
  misc_feature (17)..(22): 2'-O-Methyl
  misc_feature (24)..(25): 2'-O-Methyl
  misc_feature (27)..(33): 2'-O-Methyl
  misc_feature (1)..(4): Phosphorothioate 3'-Internucleotide Linkage
  misc_feature (16)..(16): 2'-deoxy-2'-amino
  misc_feature (26)..(26): 2'-deoxy-2'-amino
  misc_feature (33)..(33): 3'-3 attached terminal deoxyabasic moeity
ucggaggccgaaaggcgagugaggucuucuuga

SEQ ID NO: 11631 - RNA, 35 nt, Artificial Sequence
  Description of Artificial Sequence:  Enzymatic Nucleic Acid
  misc_feature (1)..(16): 2'-O-Methyl
  misc_feature (18)..(23): 2'-O-Methyl
  misc_feature (25)..(26): 2'-O-Methyl
  misc_feature (28)..(35): 2'-O-Methyl
  misc_feature (1)..(4): Phosphorothioate 3'-Internucleotide Linkage
  misc_feature (17)..(17): 2'-deoxy-2'-amino
  misc_feature (27)..(27): 2'-deoxy-2'-amino
  misc_feature (35)..(35): 3'-3 attached terminal deoxyabasic moeity
cucggaggccgaaaggcgagugaggucuucuugau

SEQ ID NO: 11632 - RNA, 33 nt, Artificial Sequence
  Description of Artificial Sequence:  Enzymatic Nucleic Acid
  misc_feature (1)..(15): 2'-O-Methyl
  misc_feature (17)..(22): 2'-O-Methyl
  misc_feature (24)..(25): 2'-O-Methyl
  misc_feature (27)..(33): 2'-O-Methyl
  misc_feature (1)..(4): Phosphorothioate 3'-Internucleotide Linkage
  misc_feature (16)..(16): 2'-deoxy-2'-amino
  misc_feature (26)..(26): 2'-deoxy-2'-amino
  misc_feature (33)..(33): 3'-3 attached terminal deoxyabasic moeity
cuuucagccgaaaggcgagugaggucuagaggc

SEQ ID NO: 11633 - RNA, 35 nt, Artificial Sequence
  Description of Artificial Sequence:  Enzymatic Nucleic Acid
  misc_feature (1)..(16): 2'-O-Methyl
  misc_feature (18)..(23): 2'-O-Methyl
  misc_feature (25)..(26): 2'-O-Methyl
  misc_feature (28)..(35): 2'-O-Methyl
  misc_feature (1)..(4): Phosphorothioate 3'-Internucleotide Linkage
  misc_feature (17)..(17): 2'-deoxy-2'-amino
  misc_feature (27)..(27): 2'-deoxy-2'-amino
  misc_feature (35)..(35): 3'-3 attached terminal deoxyabasic moeity
gcuuucagccgaaaggcgagugaggucuagaggcc

SEQ ID NO: 11634 - RNA, 33 nt, Artificial Sequence
  Description of Artificial Sequence:  Enzymatic Nucleic Acid
  misc_feature (1)..(15): 2'-O-Methyl
  misc_feature (17)..(22): 2'-O-Methyl
  misc_feature (24)..(25): 2'-O-Methyl
  misc_feature (27)..(33): 2'-O-Methyl
  misc_feature (1)..(4): Phosphorothioate 3'-Internucleotide Linkage
  misc_feature (16)..(16): 2'-deoxy-2'-amino
  misc_feature (26)..(26): 2'-deoxy-2'-amino
  misc_feature (33)..(33): 3'-3 attached terminal deoxyabasic moeity
cgcucagccgaaaggcgagugaggucuucucca

SEQ ID NO: 11635 - RNA, 35 nt, Artificial Sequence
  Description of Artificial Sequence:  Enzymatic Nucleic Acid
  misc_feature (1)..(16): 2'-O-Methyl
  misc_feature (18)..(23): 2'-O-Methyl
  misc_feature (25)..(26): 2'-O-Methyl
  misc_feature (28)..(35): 2'-O-Methyl
  misc_feature (1)..(4): Phosphorothioate 3'-Internucleotide Linkage
  misc_feature (17)..(17): 2'-deoxy-2'-amino
  misc_feature (27)..(27): 2'-deoxy-2'-amino
  misc_feature (35)..(35): 3'-3 attached terminal deoxyabasic moeity
uccaucagccgaaaggcgagugaggucuaaucuug

SEQ ID NO: 11636 - RNA, 33 nt, Artificial Sequence
  Description of Artificial Sequence:  Enzymatic Nucleic Acid
  misc_feature (1)..(15): 2'-O-Methyl
  misc_feature (17)..(22): 2'-O-Methyl
  misc_feature (24)..(25): 2'-O-Methyl
  misc_feature (27)..(33): 2'-O-Methyl
  misc_feature (1)..(4): Phosphorothioate 3'-Internucleotide Linkage
  misc_feature (16)..(16): 2'-deoxy-2'-amino
  misc_feature (26)..(26): 2'-deoxy-2'-amino
  misc_feature (33)..(33): 3'-3 attached terminal deoxyabasic moeity
augccggccgaaaggcgagugaggucuuuccuc

SEQ ID NO: 11637 - RNA, 35 nt, Artificial Sequence
  Description of Artificial Sequence:  Enzymatic Nucleic Acid
  misc_feature (1)..(16): 2'-O-Methyl
  misc_feature (18)..(23): 2'-O-Methyl
  misc_feature (25)..(26): 2'-O-Methyl
  misc_feature (28)..(35): 2'-O-Methyl
  misc_feature (1)..(4): Phosphorothioate 3'-Internucleotide Linkage
  misc_feature (17)..(17): 2'-deoxy-2'-amino
  misc_feature (27)..(27): 2'-deoxy-2'-amino
  misc_feature (35)..(35): 3'-3 attached terminal deoxyabasic moeity
caugccggccgaaaggcgagugaggucuuuccuca

SEQ ID NO: 11638 - RNA, 35 nt, Artificial Sequence
  Description of Artificial Sequence:  Enzymatic Nucleic Acid
  misc_feature (1)..(16): 2'-O-Methyl
  misc_feature (18)..(23): 2'-O-Methyl
  misc_feature (25)..(26): 2'-O-Methyl
  misc_feature (28)..(35): 2'-O-Methyl
  misc_feature (1)..(4): Phosphorothioate 3'-Internucleotide Linkage
  misc_feature (17)..(17): 2'-deoxy-2'-amino
  misc_feature (27)..(27): 2'-deoxy-2'-amino
  misc_feature (35)..(35): 3'-3 attached terminal deoxyabasic moeity
ccugauagccgaaaggcgagugaggucuuggcacu

SEQ ID NO: 11639 - RNA, 33 nt, Artificial Sequence
  Description of Artificial Sequence:  Enzymatic Nucleic Acid
  misc_feature (1)..(15): 2'-O-Methyl
  misc_feature (17)..(17): 2'-O-Methyl
  misc_feature (19)..(20): 2'-O-Methyl
  misc_feature (22)..(33): 2'-O-Methyl
  misc_feature (1)..(4): Phosphorothioate 3'-Internucleotide Linkage
  misc_feature (16)..(16): 2'-deoxy-2'-amino
  misc_feature (18)..(18): 2'-deoxy-2'-amino
  misc_feature (33)..(33): 3'-3 attached terminal deoxyabasic moeity
ucuacggccgaaaggcucuggagugagcggagu

SEQ ID NO: 11640 - RNA, 35 nt, Artificial Sequence
  Description of Artificial Sequence:  Enzymatic Nucleic Acid
  misc_feature (1)..(16): 2'-O-Methyl
  misc_feature (18)..(18): 2'-O-Methyl
  misc_feature (20)..(21): 2'-O-Methyl
  misc_feature (23)..(35): 2'-O-Methyl
  misc_feature (1)..(4): Phosphorothioate 3'-Internucleotide Linkage
  misc_feature (17)..(17): 2'-deoxy-2'-amino
  misc_feature (19)..(19): 2'-deoxy-2'-amino
  misc_feature (35)..(35): 3'-3 attached terminal deoxyabasic moeity
ugugacagccgaaaggcucuggagugaggcgucac

SEQ ID NO: 11641 - RNA, 36 nt, Artificial Sequence
  Description of Artificial Sequence:  Enzymatic Nucleic Acid
  misc_feature (1)..(7): 2'-O-Methyl
  misc_feature (15)..(26): 2'-O-Methyl
  misc_feature (31)..(36): 2'-O-Methyl
  misc_feature (36)..(36): 3'-3 attached terminal deoxyabasic moeity
cuccuggcugaugaggccguuaggccgaaacuugca

SEQ ID NO: 11642 - RNA, 36 nt, Artificial Sequence
  Description of Artificial Sequence:  Enzymatic Nucleic Acid
  misc_feature (1)..(7): 2'-O-Methyl
  misc_feature (15)..(26): 2'-O-Methyl
  misc_feature (31)..(36): 2'-O-Methyl
  misc_feature (36)..(36): 3'-3 attached terminal deoxyabasic moeity
uuugcugcugaugaggccguuaggccgaaacucccu

SEQ ID NO: 11643 - RNA, 36 nt, Artificial Sequence
  Description of Artificial Sequence:  Enzymatic Nucleic Acid
  misc_feature (1)..(7): 2'-O-Methyl
  misc_feature (15)..(26): 2'-O-Methyl
  misc_feature (31)..(36): 2'-O-Methyl
  misc_feature (36)..(36): 3'-3 attached terminal deoxyabasic moeity
gagaggacugaugaggccguuaggccgaaagguagg

SEQ ID NO: 11644 - RNA, 36 nt, Artificial Sequence
  Description of Artificial Sequence:  Enzymatic Nucleic Acid
  misc_feature (1)..(7): 2'-O-Methyl
  misc_feature (15)..(26): 2'-O-Methyl
  misc_feature (31)..(36): 2'-O-Methyl
  misc_feature (36)..(36): 3'-3 attached terminal deoxyabasic moeity
acaaaaacugaugaggccguuaggccgaaagcagcg

SEQ ID NO: 11645 - RNA, 36 nt, Artificial Sequence
  Description of Artificial Sequence:  Enzymatic Nucleic Acid
  misc_feature (1)..(7): 2'-O-Methyl
  misc_feature (15)..(26): 2'-O-Methyl
  misc_feature (31)..(36): 2'-O-Methyl
  misc_feature (36)..(36): 3'-3 attached terminal deoxyabasic moeity
ggaggaacugaugaggccguuaggccgaaagcugcc

SEQ ID NO: 11646 - RNA, 36 nt, Artificial Sequence
  Description of Artificial Sequence:  Enzymatic Nucleic Acid
  misc_feature (1)..(7): 2'-O-Methyl
  misc_feature (15)..(26): 2'-O-Methyl
  misc_feature (31)..(36): 2'-O-Methyl
  misc_feature (30)..(30): n stands for inosine
  misc_feature (36)..(36): 3'-3 attached terminal deoxyabasic moeity
guccacccugaugaggccguuaggccgaancacgcu

SEQ ID NO: 11647 - RNA, 36 nt, Artificial Sequence
  Description of Artificial Sequence:  Enzymatic Nucleic Acid
  misc_feature (1)..(7): 2'-O-Methyl
  misc_feature (15)..(26): 2'-O-Methyl
  misc_feature (31)..(36): 2'-O-Methyl
  misc_feature (30)..(30): n stands for inosine
  misc_feature (36)..(36): 3'-3 attached terminal deoxyabasic moeity
cucccuccugaugaggccguuaggccgaancagcug

SEQ ID NO: 11648 - RNA, 36 nt, Artificial Sequence
  Description of Artificial Sequence:  Enzymatic Nucleic Acid
  misc_feature (1)..(7): 2'-O-Methyl
  misc_feature (15)..(26): 2'-O-Methyl
  misc_feature (31)..(36): 2'-O-Methyl
  misc_feature (30)..(30): n stands for inosine
  misc_feature (36)..(36): 3'-3 attached terminal deoxyabasic moeity
agaggagcugaugaggccguuaggccgaanguaggc

SEQ ID NO: 11649 - RNA, 36 nt, Artificial Sequence
  Description of Artificial Sequence:  Enzymatic Nucleic Acid
  misc_feature (1)..(7): 2'-O-Methyl
  misc_feature (15)..(26): 2'-O-Methyl
  misc_feature (31)..(36): 2'-O-Methyl
  misc_feature (30)..(30): n stands for inosine
  misc_feature (36)..(36): 3'-3 attached terminal deoxyabasic moeity
gacagaacugaugaggccguuaggccgaangaacaa

SEQ ID NO: 11650 - RNA, 36 nt, Artificial Sequence
  Description of Artificial Sequence:  Enzymatic Nucleic Acid
  misc_feature (1)..(7): 2'-O-Methyl
  misc_feature (15)..(26): 2'-O-Methyl
  misc_feature (31)..(36): 2'-O-Methyl
  misc_feature (30)..(30): n stands for inosine
  misc_feature (36)..(36): 3'-3 attached terminal deoxyabasic moeity
gguaagacugaugaggccguuaggccgaangcagca

SEQ ID NO: 11651 - RNA, 35 nt, Artificial Sequence
  Description of Artificial Sequence:  Enzymatic Nucleic Acid
  misc_feature (1)..(16): 2'-O-Methyl
  misc_feature (18)..(23): 2'-O-Methyl
  misc_feature (26)..(26): 2'-O-Methyl
  misc_feature (28)..(35): 2'-O-Methyl
  misc_feature (17)..(17): 2'-deoxy-2'-amino
  misc_feature (27)..(27): 2'-deoxy-2'-amino
  misc_feature (35)..(35): 3'-3 attached terminal deoxyabasic moeity
guccucagccgaaaggcgagugaggucuuucucug

SEQ ID NO: 11652 - RNA, 35 nt, Artificial Sequence
  Description of Artificial Sequence:  Enzymatic Nucleic Acid
  misc_feature (1)..(16): 2'-O-Methyl
  misc_feature (18)..(23): 2'-O-Methyl
  misc_feature (26)..(26): 2'-O-Methyl
  misc_feature (28)..(35): 2'-O-Methyl
  misc_feature (17)..(17): 2'-deoxy-2'-amino
  misc_feature (27)..(27): 2'-deoxy-2'-amino
  misc_feature (35)..(35): 3'-3 attached terminal deoxyabasic moeity
gaugggagccgaaaggcgagugaggucucucgaug

SEQ ID NO: 11653 - RNA, 35 nt, Artificial Sequence
  Description of Artificial Sequence:  Enzymatic Nucleic Acid
  misc_feature (1)..(16): 2'-O-Methyl
  misc_feature (18)..(23): 2'-O-Methyl
  misc_feature (26)..(26): 2'-O-Methyl
  misc_feature (28)..(35): 2'-O-Methyl
  misc_feature (17)..(17): 2'-deoxy-2'-amino
  misc_feature (27)..(27): 2'-deoxy-2'-amino
  misc_feature (35)..(35): 3'-3 attached terminal deoxyabasic moeity
cuugggagccgaaaggcgagugaggucuagcagaa

SEQ ID NO: 11654 - RNA, 35 nt, Artificial Sequence
  Description of Artificial Sequence:  Enzymatic Nucleic Acid
  misc_feature (1)..(16): 2'-O-Methyl
  misc_feature (18)..(23): 2'-O-Methyl
  misc_feature (26)..(26): 2'-O-Methyl
  misc_feature (28)..(35): 2'-O-Methyl
  misc_feature (17)..(17): 2'-deoxy-2'-amino
  misc_feature (27)..(27): 2'-deoxy-2'-amino
  misc_feature (35)..(35): 3'-3 attached terminal deoxyabasic moeity
agagcaggccgaaaggcgagugaggucugagucag

SEQ ID NO: 11655 - RNA, 35 nt, Artificial Sequence
  Description of Artificial Sequence:  Enzymatic Nucleic Acid
  misc_feature (1)..(16): 2'-O-Methyl
  misc_feature (18)..(23): 2'-O-Methyl
  misc_feature (26)..(26): 2'-O-Methyl
  misc_feature (28)..(35): 2'-O-Methyl
  misc_feature (17)..(17): 2'-deoxy-2'-amino
  misc_feature (27)..(27): 2'-deoxy-2'-amino
  misc_feature (35)..(35): 3'-3 attached terminal deoxyabasic moeity
gagcagagccgaaaggcgagugaggucuagaaggg

SEQ ID NO: 11656 - DNA, 29 bp, Artificial Sequence
  Description of Artificial Sequence:  Enzymatic Nucleic Acid
  misc_feature (1)..(7): 2'-O-Methyl
  misc_feature (23)..(29): 2'-O-Methyl
  misc_feature (29)..(29): 3'-3 attached terminal deoxyabasic moeity
guccucaggctagctacaacgauucucug

SEQ ID NO: 11657 - DNA, 29 bp, Artificial Sequence
  Description of Artificial Sequence:  Enzymatic Nucleic Acid
  misc_feature (1)..(7): 2'-O-Methyl
  misc_feature (23)..(29): 2'-O-Methyl
  misc_feature (29)..(29): 3'-3 attached terminal deoxyabasic moeity
guccugaggctagctacaacgacugcugc

SEQ ID NO: 11658 - DNA, 29 bp, Artificial Sequence
  Description of Artificial Sequence:  Enzymatic Nucleic Acid
  misc_feature (1)..(7): 2'-O-Methyl
  misc_feature (23)..(29): 2'-O-Methyl
  misc_feature (29)..(29): 3'-3 attached terminal deoxyabasic moeity
gcuggcaggctagctacaacgacucuuca

SEQ ID NO: 11659 - DNA, 29 bp, Artificial Sequence
  Description of Artificial Sequence:  Enzymatic Nucleic Acid
  misc_feature (1)..(7): 2'-O-Methyl
  misc_feature (23)..(29): 2'-O-Methyl
  misc_feature (29)..(29): 3'-3 attached terminal deoxyabasic moeity
ugucguaggctagctacaacgaucuugga

SEQ ID NO: 11660 - DNA, 29 bp, Artificial Sequence
  Description of Artificial Sequence:  Enzymatic Nucleic Acid
  misc_feature (1)..(7): 2'-O-Methyl
  misc_feature (23)..(29): 2'-O-Methyl
  misc_feature (29)..(29): 3'-3 attached terminal deoxyabasic moeity
gcugcugggctagctacaacgauugagau

SEQ ID NO: 11661 - RNA, 46 nt, Artificial Sequence
  Description of Artificial Sequence:  Enzymatic Nucleic Acid
  misc_feature (1)..(7): 2'-O-Methyl
  misc_feature (9)..(18): 2'-O-Methyl
  misc_feature (24)..(35): 2'-O-Methyl
  misc_feature (40)..(46): 2'-O-Methyl
  misc_feature (19)..(23): 2'-deoxy-2'-amino
  misc_feature (36)..(36): 2'-deoxy-2'-amino
  misc_feature (46)..(46): 3'-3 attached terminal deoxyabasic moeity
guccucaggaggaaacucccuucaaggacaucguccggguucucug

SEQ ID NO: 11662 - RNA, 46 nt, Artificial Sequence
  Description of Artificial Sequence:  Enzymatic Nucleic Acid
  misc_feature (1)..(7): 2'-O-Methyl
  misc_feature (9)..(18): 2'-O-Methyl
  misc_feature (24)..(35): 2'-O-Methyl
  misc_feature (40)..(46): 2'-O-Methyl
  misc_feature (19)..(23): 2'-deoxy-2'-amino
  misc_feature (36)..(36): 2'-deoxy-2'-amino
  misc_feature (46)..(46): 3'-3 attached terminal deoxyabasic moeity
uccugauggaggaaacucccuucaaggacaucguccgggugcugcc

SEQ ID NO: 11663 - RNA, 46 nt, Artificial Sequence
  Description of Artificial Sequence:  Enzymatic Nucleic Acid
  misc_feature (1)..(7): 2'-O-Methyl
  misc_feature (9)..(18): 2'-O-Methyl
  misc_feature (24)..(35): 2'-O-Methyl
  misc_feature (40)..(46): 2'-O-Methyl
  misc_feature (19)..(23): 2'-deoxy-2'-amino
  misc_feature (36)..(36): 2'-deoxy-2'-amino
  misc_feature (46)..(46): 3'-3 attached terminal deoxyabasic moeity
uccucuuggaggaaacucccuucaaggacaucguccggguccuccg

SEQ ID NO: 11664 - RNA, 46 nt, Artificial Sequence
  Description of Artificial Sequence:  Enzymatic Nucleic Acid
  misc_feature (1)..(7): 2'-O-Methyl
  misc_feature (9)..(18): 2'-O-Methyl
  misc_feature (24)..(35): 2'-O-Methyl
  misc_feature (40)..(46): 2'-O-Methyl
  misc_feature (19)..(23): 2'-deoxy-2'-amino
  misc_feature (36)..(36): 2'-deoxy-2'-amino
  misc_feature (46)..(46): 3'-3 attached terminal deoxyabasic moeity
ucgaucaggaggaaacucccuucaaggacaucguccgggcuccugu

SEQ ID NO: 11665 - RNA, 46 nt, Artificial Sequence
  Description of Artificial Sequence:  Enzymatic Nucleic Acid
  misc_feature (1)..(7): 2'-O-Methyl
  misc_feature (9)..(18): 2'-O-Methyl
  misc_feature (24)..(35): 2'-O-Methyl
  misc_feature (40)..(46): 2'-O-Methyl
  misc_feature (19)..(23): 2'-deoxy-2'-amino
  misc_feature (36)..(36): 2'-deoxy-2'-amino
  misc_feature (46)..(46): 3'-3 attached terminal deoxyabasic moeity
ggcagcaggaggaaacucccuucaaggacaucguccgggucccagg

SEQ ID NO: 11666 - RNA, 38 nt, Artificial Sequence
  Description of Artificial Sequence:  Enzymatic Nucleic Acid
gaggaaaacugaugaggccguuaggccgaaagccagaa

SEQ ID NO: 11667 - RNA, 38 nt, Artificial Sequence
  Description of Artificial Sequence:  Enzymatic Nucleic Acid
aggaggaacugaugaggccguuaggccgaaauagccag

SEQ ID NO: 11668 - RNA, 38 nt, Artificial Sequence
  Description of Artificial Sequence:  Enzymatic Nucleic Acid
caggaggacugaugaggccguuaggccgaaaauagcca

SEQ ID NO: 11669 - RNA, 38 nt, Artificial Sequence
  Description of Artificial Sequence:  Enzymatic Nucleic Acid
gcaggaggcugaugaggccguuaggccgaaaaauagcc

SEQ ID NO: 11670 - RNA, 38 nt, Artificial Sequence
  Description of Artificial Sequence:  Enzymatic Nucleic Acid
ggcaggagcugaugaggccguuaggccgaaaaaauagc

SEQ ID NO: 11671 - RNA, 38 nt, Artificial Sequence
  Description of Artificial Sequence:  Enzymatic Nucleic Acid
aacggcagcugaugaggccguuaggccgaaaggaaaau

SEQ ID NO: 11672 - RNA, 38 nt, Artificial Sequence
  Description of Artificial Sequence:  Enzymatic Nucleic Acid
cgagucggcugaugaggccguuaggccgaaacggcagg

SEQ ID NO: 11673 - RNA, 38 nt, Artificial Sequence
  Description of Artificial Sequence:  Enzymatic Nucleic Acid
ccgagucgcugaugaggccguuaggccgaaaacggcag

SEQ ID NO: 11674 - RNA, 38 nt, Artificial Sequence
  Description of Artificial Sequence:  Enzymatic Nucleic Acid
cuggugcccugaugaggccguuaggccgaaagucggaa

SEQ ID NO: 11675 - RNA, 38 nt, Artificial Sequence
  Description of Artificial Sequence:  Enzymatic Nucleic Acid
uagagacacugaugaggccguuaggccgaaacucuggu

SEQ ID NO: 11676 - RNA, 38 nt, Artificial Sequence
  Description of Artificial Sequence:  Enzymatic Nucleic Acid
ucaguagacugaugaggccguuaggccgaaacagacuc

SEQ ID NO: 11677 - RNA, 38 nt, Artificial Sequence
  Description of Artificial Sequence:  Enzymatic Nucleic Acid
ucucaguacugaugaggccguuaggccgaaagacagac

SEQ ID NO: 11678 - RNA, 38 nt, Artificial Sequence
  Description of Artificial Sequence:  Enzymatic Nucleic Acid
guucucagcugaugaggccguuaggccgaaagagacag

SEQ ID NO: 11679 - RNA, 38 nt, Artificial Sequence
  Description of Artificial Sequence:  Enzymatic Nucleic Acid
ucggcccucugaugaggccguuaggccgaaacgcgcug

SEQ ID NO: 11680 - RNA, 38 nt, Artificial Sequence
  Description of Artificial Sequence:  Enzymatic Nucleic Acid
ccagugaacugaugaggccguuaggccgaaagcucggc

SEQ ID NO: 11681 - RNA, 38 nt, Artificial Sequence
  Description of Artificial Sequence:  Enzymatic Nucleic Acid
ggccagugcugaugaggccguuaggccgaaagagcucg

SEQ ID NO: 11682 - RNA, 38 nt, Artificial Sequence
  Description of Artificial Sequence:  Enzymatic Nucleic Acid
aggccagucugaugaggccguuaggccgaaaagagcuc

SEQ ID NO: 11683 - RNA, 38 nt, Artificial Sequence
  Description of Artificial Sequence:  Enzymatic Nucleic Acid
agagcgcgcugaugaggccguuaggccgaaagcaggcc

SEQ ID NO: 11684 - RNA, 38 nt, Artificial Sequence
  Description of Artificial Sequence:  Enzymatic Nucleic Acid
gcauugaacugaugaggccguuaggccgaaagcgcgga

SEQ ID NO: 11685 - RNA, 38 nt, Artificial Sequence
  Description of Artificial Sequence:  Enzymatic Nucleic Acid
uggcauugcugaugaggccguuaggccgaaagagcgcg

SEQ ID NO: 11686 - RNA, 38 nt, Artificial Sequence
  Description of Artificial Sequence:  Enzymatic Nucleic Acid
cuggcauucugaugaggccguuaggccgaaaagagcgc

SEQ ID NO: 11687 - RNA, 38 nt, Artificial Sequence
  Description of Artificial Sequence:  Enzymatic Nucleic Acid
ugcagggucugaugaggccguuaggccgaaagcgccug

SEQ ID NO: 11688 - RNA, 38 nt, Artificial Sequence
  Description of Artificial Sequence:  Enzymatic Nucleic Acid
agaggcggcugaugaggccguuaggccgaaacgcucug

SEQ ID NO: 11689 - RNA, 38 nt, Artificial Sequence
  Description of Artificial Sequence:  Enzymatic Nucleic Acid
cucuuugacugaugaggccguuaggccgaaaggcggga

SEQ ID NO: 11690 - RNA, 38 nt, Artificial Sequence
  Description of Artificial Sequence:  Enzymatic Nucleic Acid
cccucuuucugaugaggccguuaggccgaaagaggcgg

SEQ ID NO: 11691 - RNA, 38 nt, Artificial Sequence
  Description of Artificial Sequence:  Enzymatic Nucleic Acid
ccuaucuacugaugaggccguuaggccgaaacucgcgg

SEQ ID NO: 11692 - RNA, 38 nt, Artificial Sequence
  Description of Artificial Sequence:  Enzymatic Nucleic Acid
uccuaucucugaugaggccguuaggccgaaaacucgcg

SEQ ID NO: 11693 - RNA, 38 nt, Artificial Sequence
  Description of Artificial Sequence:  Enzymatic Nucleic Acid
cuccuauccugaugaggccguuaggccgaaaaacucgc

SEQ ID NO: 11694 - RNA, 38 nt, Artificial Sequence
  Description of Artificial Sequence:  Enzymatic Nucleic Acid
gaaccucccugaugaggccguuaggccgaaaucuaaac

SEQ ID NO: 11695 - RNA, 38 nt, Artificial Sequence
  Description of Artificial Sequence:  Enzymatic Nucleic Acid
acggcaggcugaugaggccguuaggccgaaaccuccua

SEQ ID NO: 11696 - RNA, 38 nt, Artificial Sequence
  Description of Artificial Sequence:  Enzymatic Nucleic Acid
cacggcagcugaugaggccguuaggccgaaaaccuccu

SEQ ID NO: 11697 - RNA, 38 nt, Artificial Sequence
  Description of Artificial Sequence:  Enzymatic Nucleic Acid
aaagcucccugaugaggccguuaggccgaaagggcggc

SEQ ID NO: 11698 - RNA, 38 nt, Artificial Sequence
  Description of Artificial Sequence:  Enzymatic Nucleic Acid
cacagaaacugaugaggccguuaggccgaaagcuccga

SEQ ID NO: 11699 - RNA, 38 nt, Artificial Sequence
  Description of Artificial Sequence:  Enzymatic Nucleic Acid
ccacagaacugaugaggccguuaggccgaaaagcuccg

SEQ ID NO: 11700 - RNA, 38 nt, Artificial Sequence
  Description of Artificial Sequence:  Enzymatic Nucleic Acid
gccacagacugaugaggccguuaggccgaaaaagcucc

SEQ ID NO: 11701 - RNA, 38 nt, Artificial Sequence
  Description of Artificial Sequence:  Enzymatic Nucleic Acid
cgccacagcugaugaggccguuaggccgaaaaaagcuc

SEQ ID NO: 11702 - RNA, 38 nt, Artificial Sequence
  Description of Artificial Sequence:  Enzymatic Nucleic Acid
gcgccacacugaugaggccguuaggccgaaaaaaagcu

SEQ ID NO: 11703 - RNA, 38 nt, Artificial Sequence
  Description of Artificial Sequence:  Enzymatic Nucleic Acid
gggcggagcugaugaggccguuaggccgaaagcugcgc

SEQ ID NO: 11704 - RNA, 38 nt, Artificial Sequence
  Description of Artificial Sequence:  Enzymatic Nucleic Acid
cgggcggacugaugaggccguuaggccgaaaagcugcg

SEQ ID NO: 11705 - RNA, 38 nt, Artificial Sequence
  Description of Artificial Sequence:  Enzymatic Nucleic Acid
cucgggcgcugaugaggccguuaggccgaaagaagcug

SEQ ID NO: 11706 - RNA, 38 nt, Artificial Sequence
  Description of Artificial Sequence:  Enzymatic Nucleic Acid
gugcuaagcugaugaggccguuaggccgaaagcccccg

SEQ ID NO: 11707 - RNA, 38 nt, Artificial Sequence
  Description of Artificial Sequence:  Enzymatic Nucleic Acid
cgggugcucugaugaggccguuaggccgaaaggagccc

SEQ ID NO: 11708 - RNA, 38 nt, Artificial Sequence
  Description of Artificial Sequence:  Enzymatic Nucleic Acid
ccgggugccugaugaggccguuaggccgaaaaggagcc

SEQ ID NO: 11709 - RNA, 38 nt, Artificial Sequence
  Description of Artificial Sequence:  Enzymatic Nucleic Acid
ggaagggccugaugaggccguuaggccgaaagggcccc

SEQ ID NO: 11710 - RNA, 38 nt, Artificial Sequence
  Description of Artificial Sequence:  Enzymatic Nucleic Acid
ggcugcggcugaugaggccguuaggccgaaagggcgag

SEQ ID NO: 11711 - RNA, 38 nt, Artificial Sequence
  Description of Artificial Sequence:  Enzymatic Nucleic Acid
aggcugcgcugaugaggccguuaggccgaaaagggcga

SEQ ID NO: 11712 - RNA, 38 nt, Artificial Sequence
  Description of Artificial Sequence:  Enzymatic Nucleic Acid
cuggagugcugaugaggccguuaggccgaaaggcugcg

SEQ ID NO: 11713 - RNA, 38 nt, Artificial Sequence
  Description of Artificial Sequence:  Enzymatic Nucleic Acid
gcuggagucugaugaggccguuaggccgaaaaggcugc

SEQ ID NO: 11714 - RNA, 38 nt, Artificial Sequence
  Description of Artificial Sequence:  Enzymatic Nucleic Acid
gagggcugcugaugaggccguuaggccgaaagugaagg

SEQ ID NO: 11715 - RNA, 38 nt, Artificial Sequence
  Description of Artificial Sequence:  Enzymatic Nucleic Acid
cgggagcacugaugaggccguuaggccgaaagggcugg

SEQ ID NO: 11716 - RNA, 38 nt, Artificial Sequence
  Description of Artificial Sequence:  Enzymatic Nucleic Acid
gcgugcggcugaugaggccguuaggccgaaagcagagg

SEQ ID NO: 11717 - RNA, 38 nt, Artificial Sequence
  Description of Artificial Sequence:  Enzymatic Nucleic Acid
agaacggccugaugaggccguuaggccgaaacuucaug

SEQ ID NO: 11718 - RNA, 38 nt, Artificial Sequence
  Description of Artificial Sequence:  Enzymatic Nucleic Acid
agcgguagcugaugaggccguuaggccgaaacggcgac

SEQ ID NO: 11719 - RNA, 38 nt, Artificial Sequence
  Description of Artificial Sequence:  Enzymatic Nucleic Acid
cagcgguacugaugaggccguuaggccgaaaacggcga

SEQ ID NO: 11720 - RNA, 38 nt, Artificial Sequence
  Description of Artificial Sequence:  Enzymatic Nucleic Acid
ggcagcggcugaugaggccguuaggccgaaagaacggc

SEQ ID NO: 11721 - RNA, 38 nt, Artificial Sequence
  Description of Artificial Sequence:  Enzymatic Nucleic Acid
uuuccacacugaugaggccguuaggccgaaagguggug

SEQ ID NO: 11722 - RNA, 38 nt, Artificial Sequence
  Description of Artificial Sequence:  Enzymatic Nucleic Acid
ucaccgcccugaugaggccguuaggccgaaaguugccu

SEQ ID NO: 11723 - RNA, 38 nt, Artificial Sequence
  Description of Artificial Sequence:  Enzymatic Nucleic Acid
gugcugaacugaugaggccguuaggccgaaagcacccc

SEQ ID NO: 11724 - RNA, 38 nt, Artificial Sequence
  Description of Artificial Sequence:  Enzymatic Nucleic Acid
cggugcugcugaugaggccguuaggccgaaagagcacc

SEQ ID NO: 11725 - RNA, 38 nt, Artificial Sequence
  Description of Artificial Sequence:  Enzymatic Nucleic Acid
ccggugcucugaugaggccguuaggccgaaaagagcac

SEQ ID NO: 11726 - RNA, 38 nt, Artificial Sequence
  Description of Artificial Sequence:  Enzymatic Nucleic Acid
uugcccagcugaugaggccguuaggccgaaaggccggu

SEQ ID NO: 11727 - RNA, 38 nt, Artificial Sequence
  Description of Artificial Sequence:  Enzymatic Nucleic Acid
ccagcccccugaugaggccguuaggccgaaagcgcgcc

SEQ ID NO: 11728 - RNA, 38 nt, Artificial Sequence
  Description of Artificial Sequence:  Enzymatic Nucleic Acid
gacgccgccugaugaggccguuaggccgaaagcaccac

SEQ ID NO: 11729 - RNA, 38 nt, Artificial Sequence
  Description of Artificial Sequence:  Enzymatic Nucleic Acid
gcgcagugcugaugaggccguuaggccgaaacgccgcg

SEQ ID NO: 11730 - RNA, 38 nt, Artificial Sequence
  Description of Artificial Sequence:  Enzymatic Nucleic Acid
agaagacccugaugaggccguuaggccgaaagggcagc

SEQ ID NO: 11731 - RNA, 38 nt, Artificial Sequence
  Description of Artificial Sequence:  Enzymatic Nucleic Acid
auguagaacugaugaggccguuaggccgaaaccgaggg

SEQ ID NO: 11732 - RNA, 38 nt, Artificial Sequence
  Description of Artificial Sequence:  Enzymatic Nucleic Acid
gcauguagcugaugaggccguuaggccgaaagaccgag

SEQ ID NO: 11733 - RNA, 38 nt, Artificial Sequence
  Description of Artificial Sequence:  Enzymatic Nucleic Acid
agcauguacugaugaggccguuaggccgaaaagaccga

SEQ ID NO: 11734 - RNA, 38 nt, Artificial Sequence
  Description of Artificial Sequence:  Enzymatic Nucleic Acid
ccagcaugcugaugaggccguuaggccgaaagaagacc

SEQ ID NO: 11735 - RNA, 38 nt, Artificial Sequence
  Description of Artificial Sequence:  Enzymatic Nucleic Acid
aagucggucugaugaggccguuaggccgaaaccgucag

SEQ ID NO: 11736 - RNA, 38 nt, Artificial Sequence
  Description of Artificial Sequence:  Enzymatic Nucleic Acid
ugcccagccugaugaggccguuaggccgaaagucggug

SEQ ID NO: 11737 - RNA, 38 nt, Artificial Sequence
  Description of Artificial Sequence:  Enzymatic Nucleic Acid
gggcuuagcugaugaggccguuaggccgaaaggcacuu

SEQ ID NO: 11738 - RNA, 38 nt, Artificial Sequence
  Description of Artificial Sequence:  Enzymatic Nucleic Acid
accgggcucugaugaggccguuaggccgaaaggaggca

SEQ ID NO: 11739 - RNA, 38 nt, Artificial Sequence
  Description of Artificial Sequence:  Enzymatic Nucleic Acid
ucugagcgcugaugaggccguuaggccgaaaggcagcc

SEQ ID NO: 11740 - RNA, 38 nt, Artificial Sequence
  Description of Artificial Sequence:  Enzymatic Nucleic Acid
ccgguucucugaugaggccguuaggccgaaagcguagg

SEQ ID NO: 11741 - RNA, 38 nt, Artificial Sequence
  Description of Artificial Sequence:  Enzymatic Nucleic Acid
cacccgcacugaugaggccguuaggccgaaacuccggu

SEQ ID NO: 11742 - RNA, 38 nt, Artificial Sequence
  Description of Artificial Sequence:  Enzymatic Nucleic Acid
gcgggcgccugaugaggccguuaggccgaaagcacccg

SEQ ID NO: 11743 - RNA, 38 nt, Artificial Sequence
  Description of Artificial Sequence:  Enzymatic Nucleic Acid
aguugucccugaugaggccguuaggccgaaaugcgggc

SEQ ID NO: 11744 - RNA, 38 nt, Artificial Sequence
  Description of Artificial Sequence:  Enzymatic Nucleic Acid
ggcacaaccugaugaggccguuaggccgaaaguugucc

SEQ ID NO: 11745 - RNA, 38 nt, Artificial Sequence
  Description of Artificial Sequence:  Enzymatic Nucleic Acid
cuuggcaccugaugaggccguuaggccgaaacgaguug

SEQ ID NO: 11746 - RNA, 38 nt, Artificial Sequence
  Description of Artificial Sequence:  Enzymatic Nucleic Acid
agaaggcgcugaugaggccguuaggccgaaaggcuugg

SEQ ID NO: 11747 - RNA, 38 nt, Artificial Sequence
  Description of Artificial Sequence:  Enzymatic Nucleic Acid
aagaaggccugaugaggccguuaggccgaaaaggcuug

SEQ ID NO: 11748 - RNA, 38 nt, Artificial Sequence
  Description of Artificial Sequence:  Enzymatic Nucleic Acid
acaugaagcugaugaggccguuaggccgaaaggcgaag

SEQ ID NO: 11749 - RNA, 38 nt, Artificial Sequence
  Description of Artificial Sequence:  Enzymatic Nucleic Acid
gacaugaacugaugaggccguuaggccgaaaaggcgaa

SEQ ID NO: 11750 - RNA, 38 nt, Artificial Sequence
  Description of Artificial Sequence:  Enzymatic Nucleic Acid
aggacaugcugaugaggccguuaggccgaaagaaggcg

SEQ ID NO: 11751 - RNA, 38 nt, Artificial Sequence
  Description of Artificial Sequence:  Enzymatic Nucleic Acid
aaggacaucugaugaggccguuaggccgaaaagaaggc

SEQ ID NO: 11752 - RNA, 38 nt, Artificial Sequence
  Description of Artificial Sequence:  Enzymatic Nucleic Acid
caaagaagcugaugaggccguuaggccgaaacaugaag

SEQ ID NO: 11753 - RNA, 38 nt, Artificial Sequence
  Description of Artificial Sequence:  Enzymatic Nucleic Acid
gcccaaagcugaugaggccguuaggccgaaaggacaug

SEQ ID NO: 11754 - RNA, 38 nt, Artificial Sequence
  Description of Artificial Sequence:  Enzymatic Nucleic Acid
agcccaaacugaugaggccguuaggccgaaaaggacau

SEQ ID NO: 11755 - RNA, 38 nt, Artificial Sequence
  Description of Artificial Sequence:  Enzymatic Nucleic Acid
agagcccacugaugaggccguuaggccgaaagaaggac

SEQ ID NO: 11756 - RNA, 38 nt, Artificial Sequence
  Description of Artificial Sequence:  Enzymatic Nucleic Acid
gagagccccugaugaggccguuaggccgaaaagaagga

SEQ ID NO: 11757 - RNA, 38 nt, Artificial Sequence
  Description of Artificial Sequence:  Enzymatic Nucleic Acid
gucgaggacugaugaggccguuaggccgaaagcccaaa

SEQ ID NO: 11758 - RNA, 38 nt, Artificial Sequence
  Description of Artificial Sequence:  Enzymatic Nucleic Acid
gugucgagcugaugaggccguuaggccgaaagagccca

SEQ ID NO: 11759 - RNA, 38 nt, Artificial Sequence
  Description of Artificial Sequence:  Enzymatic Nucleic Acid
gcaguguccugaugaggccguuaggccgaaaggagagc

SEQ ID NO: 11760 - RNA, 38 nt, Artificial Sequence
  Description of Artificial Sequence:  Enzymatic Nucleic Acid
auggccagcugaugaggccguuaggccgaaaguugcag

SEQ ID NO: 11761 - RNA, 38 nt, Artificial Sequence
  Description of Artificial Sequence:  Enzymatic Nucleic Acid
ccuagggacugaugaggccguuaggccgaaagccagca

SEQ ID NO: 11762 - RNA, 38 nt, Artificial Sequence
  Description of Artificial Sequence:  Enzymatic Nucleic Acid
gcccuaggcugaugaggccguuaggccgaaagagccag

SEQ ID NO: 11763 - RNA, 38 nt, Artificial Sequence
  Description of Artificial Sequence:  Enzymatic Nucleic Acid
gggugccccugaugaggccguuaggccgaaagggagag

SEQ ID NO: 11764 - RNA, 38 nt, Artificial Sequence
  Description of Artificial Sequence:  Enzymatic Nucleic Acid
guagaagacugaugaggccguuaggccgaaagggugcc

SEQ ID NO: 11765 - RNA, 38 nt, Artificial Sequence
  Description of Artificial Sequence:  Enzymatic Nucleic Acid
gguagaagcugaugaggccguuaggccgaaaagggugc

SEQ ID NO: 11766 - RNA, 38 nt, Artificial Sequence
  Description of Artificial Sequence:  Enzymatic Nucleic Acid
cgguagaacugaugaggccguuaggccgaaaaagggug

SEQ ID NO: 11767 - RNA, 38 nt, Artificial Sequence
  Description of Artificial Sequence:  Enzymatic Nucleic Acid
gucgguagcugaugaggccguuaggccgaaagaaaggg

SEQ ID NO: 11768 - RNA, 38 nt, Artificial Sequence
  Description of Artificial Sequence:  Enzymatic Nucleic Acid
cgucgguacugaugaggccguuaggccgaaaagaaagg

SEQ ID NO: 11769 - RNA, 38 nt, Artificial Sequence
  Description of Artificial Sequence:  Enzymatic Nucleic Acid
gccgucggcugaugaggccguuaggccgaaagaagaaa

SEQ ID NO: 11770 - RNA, 38 nt, Artificial Sequence
  Description of Artificial Sequence:  Enzymatic Nucleic Acid
cgcagggucugaugaggccguuaggccgaaaugugccg

SEQ ID NO: 11771 - RNA, 38 nt, Artificial Sequence
  Description of Artificial Sequence:  Enzymatic Nucleic Acid
ccagggagcugaugaggccguuaggccgaaaggcgcuc

SEQ ID NO: 11772 - RNA, 38 nt, Artificial Sequence
  Description of Artificial Sequence:  Enzymatic Nucleic Acid
gccagggacugaugaggccguuaggccgaaaaggcgcu

SEQ ID NO: 11773 - RNA, 38 nt, Artificial Sequence
  Description of Artificial Sequence:  Enzymatic Nucleic Acid
aagccaggcugaugaggccguuaggccgaaagaaggcg

SEQ ID NO: 11774 - RNA, 38 nt, Artificial Sequence
  Description of Artificial Sequence:  Enzymatic Nucleic Acid
cgcgcagacugaugaggccguuaggccgaaagccaggg

SEQ ID NO: 11775 - RNA, 38 nt, Artificial Sequence
  Description of Artificial Sequence:  Enzymatic Nucleic Acid
gcgcgcagcugaugaggccguuaggccgaaaagccagg

SEQ ID NO: 11776 - RNA, 38 nt, Artificial Sequence
  Description of Artificial Sequence:  Enzymatic Nucleic Acid
agcgcgcacugaugaggccguuaggccgaaaaagccag

SEQ ID NO: 11777 - RNA, 38 nt, Artificial Sequence
  Description of Artificial Sequence:  Enzymatic Nucleic Acid
augaaaggcugaugaggccguuaggccgaaagcgcgca

SEQ ID NO: 11778 - RNA, 38 nt, Artificial Sequence
  Description of Artificial Sequence:  Enzymatic Nucleic Acid
gcccaugacugaugaggccguuaggccgaaagguagcg

SEQ ID NO: 11779 - RNA, 38 nt, Artificial Sequence
  Description of Artificial Sequence:  Enzymatic Nucleic Acid
agcccaugcugaugaggccguuaggccgaaaagguagc

SEQ ID NO: 11780 - RNA, 38 nt, Artificial Sequence
  Description of Artificial Sequence:  Enzymatic Nucleic Acid
aagcccaucugaugaggccguuaggccgaaaaagguag

SEQ ID NO: 11781 - RNA, 38 nt, Artificial Sequence
  Description of Artificial Sequence:  Enzymatic Nucleic Acid
acuucccgcugaugaggccguuaggccgaaagcccaug

SEQ ID NO: 11782 - RNA, 38 nt, Artificial Sequence
  Description of Artificial Sequence:  Enzymatic Nucleic Acid
aacuuccccugaugaggccguuaggccgaaaagcccau

SEQ ID NO: 11783 - RNA, 38 nt, Artificial Sequence
  Description of Artificial Sequence:  Enzymatic Nucleic Acid
acugcacgcugaugaggccguuaggccgaaacuucccg

SEQ ID NO: 11784 - RNA, 38 nt, Artificial Sequence
  Description of Artificial Sequence:  Enzymatic Nucleic Acid
uacugcaccugaugaggccguuaggccgaaaacuuccc

SEQ ID NO: 11785 - RNA, 38 nt, Artificial Sequence
  Description of Artificial Sequence:  Enzymatic Nucleic Acid
cggggcagcugaugaggccguuaggccgaaacugcacg

SEQ ID NO: 11786 - RNA, 38 nt, Artificial Sequence
  Description of Artificial Sequence:  Enzymatic Nucleic Acid
ucuggauacugaugaggccguuaggccgaaagcaccag

SEQ ID NO: 11787 - RNA, 38 nt, Artificial Sequence
  Description of Artificial Sequence:  Enzymatic Nucleic Acid
aucuggaucugaugaggccguuaggccgaaaagcacca

SEQ ID NO: 11788 - RNA, 38 nt, Artificial Sequence
  Description of Artificial Sequence:  Enzymatic Nucleic Acid
caucuggacugaugaggccguuaggccgaaaaagcacc

SEQ ID NO: 11789 - RNA, 38 nt, Artificial Sequence
  Description of Artificial Sequence:  Enzymatic Nucleic Acid
accaucugcugaugaggccguuaggccgaaauaaagca

SEQ ID NO: 11790 - RNA, 38 nt, Artificial Sequence
  Description of Artificial Sequence:  Enzymatic Nucleic Acid
uccucgugcugaugaggccguuaggccgaaaccaucug

SEQ ID NO: 11791 - RNA, 38 nt, Artificial Sequence
  Description of Artificial Sequence:  Enzymatic Nucleic Acid
ccgacagccugaugaggccguuaggccgaaagcccucc

SEQ ID NO: 11792 - RNA, 38 nt, Artificial Sequence
  Description of Artificial Sequence:  Enzymatic Nucleic Acid
ccagcacccugaugaggccguuaggccgaaacagcgag

SEQ ID NO: 11793 - RNA, 38 nt, Artificial Sequence
  Description of Artificial Sequence:  Enzymatic Nucleic Acid
gcacagagcugaugaggccguuaggccgaaaccccagc

SEQ ID NO: 11794 - RNA, 38 nt, Artificial Sequence
  Description of Artificial Sequence:  Enzymatic Nucleic Acid
agagcacacugaugaggccguuaggccgaaaguacccc

SEQ ID NO: 11795 - RNA, 38 nt, Artificial Sequence
  Description of Artificial Sequence:  Enzymatic Nucleic Acid
cuggaguacugaugaggccguuaggccgaaagcacaga

SEQ ID NO: 11796 - RNA, 38 nt, Artificial Sequence
  Description of Artificial Sequence:  Enzymatic Nucleic Acid
ggcuggagcugaugaggccguuaggccgaaagagcaca

SEQ ID NO: 11797 - RNA, 38 nt, Artificial Sequence
  Description of Artificial Sequence:  Enzymatic Nucleic Acid
ugaggcugcugaugaggccguuaggccgaaaguagagc

SEQ ID NO: 11798 - RNA, 38 nt, Artificial Sequence
  Description of Artificial Sequence:  Enzymatic Nucleic Acid
agcgccaucugaugaggccguuaggccgaaaggcugga

SEQ ID NO: 11799 - RNA, 38 nt, Artificial Sequence
  Description of Artificial Sequence:  Enzymatic Nucleic Acid
guggcgagcugaugaggccguuaggccgaaaccagcag

SEQ ID NO: 11800 - RNA, 38 nt, Artificial Sequence
  Description of Artificial Sequence:  Enzymatic Nucleic Acid
acgguggccugaugaggccguuaggccgaaaggaccag

SEQ ID NO: 11801 - RNA, 38 nt, Artificial Sequence
  Description of Artificial Sequence:  Enzymatic Nucleic Acid
auggcgcccugaugaggccguuaggccgaaagguugca

SEQ ID NO: 11802 - RNA, 38 nt, Artificial Sequence
  Description of Artificial Sequence:  Enzymatic Nucleic Acid
aucgcauacugaugaggccguuaggccgaaagguugcg

SEQ ID NO: 11803 - RNA, 38 nt, Artificial Sequence
  Description of Artificial Sequence:  Enzymatic Nucleic Acid
gcaucgcacugaugaggccguuaggccgaaagagguug

SEQ ID NO: 11804 - RNA, 38 nt, Artificial Sequence
  Description of Artificial Sequence:  Enzymatic Nucleic Acid
uggugcagcugaugaggccguuaggccgaaagcgcggg

SEQ ID NO: 11805 - RNA, 38 nt, Artificial Sequence
  Description of Artificial Sequence:  Enzymatic Nucleic Acid
gcugagggcugaugaggccguuaggccgaaacgcuucc

SEQ ID NO: 11806 - RNA, 38 nt, Artificial Sequence
  Description of Artificial Sequence:  Enzymatic Nucleic Acid
caggggcucugaugaggccguuaggccgaaaggggacg

SEQ ID NO: 11807 - RNA, 38 nt, Artificial Sequence
  Description of Artificial Sequence:  Enzymatic Nucleic Acid
caggaggucugaugaggccguuaggccgaaauccagcu

SEQ ID NO: 11808 - RNA, 38 nt, Artificial Sequence
  Description of Artificial Sequence:  Enzymatic Nucleic Acid
agcagcagcugaugaggccguuaggccgaaaggugauc

SEQ ID NO: 11809 - RNA, 38 nt, Artificial Sequence
  Description of Artificial Sequence:  Enzymatic Nucleic Acid
auagugaacugaugaggccguuaggccgaaagcacggu

SEQ ID NO: 11810 - RNA, 38 nt, Artificial Sequence
  Description of Artificial Sequence:  Enzymatic Nucleic Acid
acauagugcugaugaggccguuaggccgaaagagcacg

SEQ ID NO: 11811 - RNA, 38 nt, Artificial Sequence
  Description of Artificial Sequence:  Enzymatic Nucleic Acid
cacauagucugaugaggccguuaggccgaaaagagcac

SEQ ID NO: 11812 - RNA, 38 nt, Artificial Sequence
  Description of Artificial Sequence:  Enzymatic Nucleic Acid
agaacacacugaugaggccguuaggccgaaagugaaga

SEQ ID NO: 11813 - RNA, 38 nt, Artificial Sequence
  Description of Artificial Sequence:  Enzymatic Nucleic Acid
gggcagagcugaugaggccguuaggccgaaacacauag

SEQ ID NO: 11814 - RNA, 38 nt, Artificial Sequence
  Description of Artificial Sequence:  Enzymatic Nucleic Acid
cgggcagacugaugaggccguuaggccgaaaacacaua

SEQ ID NO: 11815 - RNA, 38 nt, Artificial Sequence
  Description of Artificial Sequence:  Enzymatic Nucleic Acid
uacgggcacugaugaggccguuaggccgaaagaacaca

SEQ ID NO: 11816 - RNA, 38 nt, Artificial Sequence
  Description of Artificial Sequence:  Enzymatic Nucleic Acid
cgauaaaucugaugaggccguuaggccgaaacgggcag

SEQ ID NO: 11817 - RNA, 38 nt, Artificial Sequence
  Description of Artificial Sequence:  Enzymatic Nucleic Acid
gcgcgauacugaugaggccguuaggccgaaauuacggg

SEQ ID NO: 11818 - RNA, 38 nt, Artificial Sequence
  Description of Artificial Sequence:  Enzymatic Nucleic Acid
agcgcgaucugaugaggccguuaggccgaaaauuacgg

SEQ ID NO: 11819 - RNA, 38 nt, Artificial Sequence
  Description of Artificial Sequence:  Enzymatic Nucleic Acid
aagcgcgacugaugaggccguuaggccgaaaaauuacg

SEQ ID NO: 11820 - RNA, 38 nt, Artificial Sequence
  Description of Artificial Sequence:  Enzymatic Nucleic Acid
guaagcgccugaugaggccguuaggccgaaauaaauua

SEQ ID NO: 11821 - RNA, 38 nt, Artificial Sequence
  Description of Artificial Sequence:  Enzymatic Nucleic Acid
uccauagucugaugaggccguuaggccgaaagcgcgau

SEQ ID NO: 11822 - RNA, 38 nt, Artificial Sequence
  Description of Artificial Sequence:  Enzymatic Nucleic Acid
cuccauagcugaugaggccguuaggccgaaaagcgcga

SEQ ID NO: 11823 - RNA, 38 nt, Artificial Sequence
  Description of Artificial Sequence:  Enzymatic Nucleic Acid
augcuccacugaugaggccguuaggccgaaaguaagcg

SEQ ID NO: 11824 - RNA, 38 nt, Artificial Sequence
  Description of Artificial Sequence:  Enzymatic Nucleic Acid
cauccuuacugaugaggccguuaggccgaaaugcucca

SEQ ID NO: 11825 - RNA, 38 nt, Artificial Sequence
  Description of Artificial Sequence:  Enzymatic Nucleic Acid
acauccuucugaugaggccguuaggccgaaaaugcucc

SEQ ID NO: 11826 - RNA, 38 nt, Artificial Sequence
  Description of Artificial Sequence:  Enzymatic Nucleic Acid
gacauccucugaugaggccguuaggccgaaaaaugcuc

SEQ ID NO: 11827 - RNA, 38 nt, Artificial Sequence
  Description of Artificial Sequence:  Enzymatic Nucleic Acid
uucuccuucugaugaggccguuaggccgaaacauccuu

SEQ ID NO: 11828 - RNA, 38 nt, Artificial Sequence
  Description of Artificial Sequence:  Enzymatic Nucleic Acid
cuucuucacugaugaggccguuaggccgaaagguccug

SEQ ID NO: 11829 - RNA, 38 nt, Artificial Sequence
  Description of Artificial Sequence:  Enzymatic Nucleic Acid
aaggcucgcugaugaggccguuaggccgaaaggucuuc

SEQ ID NO: 11830 - RNA, 38 nt, Artificial Sequence
  Description of Artificial Sequence:  Enzymatic Nucleic Acid
gaaaucgccugaugaggccguuaggccgaaaggcucgg

SEQ ID NO: 11831 - RNA, 38 nt, Artificial Sequence
  Description of Artificial Sequence:  Enzymatic Nucleic Acid
cagauagacugaugaggccguuaggccgaaaucgcaag

SEQ ID NO: 11832 - RNA, 38 nt, Artificial Sequence
  Description of Artificial Sequence:  Enzymatic Nucleic Acid
acagauagcugaugaggccguuaggccgaaaaucgcaa

SEQ ID NO: 11833 - RNA, 38 nt, Artificial Sequence
  Description of Artificial Sequence:  Enzymatic Nucleic Acid
cacagauacugaugaggccguuaggccgaaaaaucgca

SEQ ID NO: 11834 - RNA, 38 nt, Artificial Sequence
  Description of Artificial Sequence:  Enzymatic Nucleic Acid
aucacagacugaugaggccguuaggccgaaagaaaucg

SEQ ID NO: 11835 - RNA, 38 nt, Artificial Sequence
  Description of Artificial Sequence:  Enzymatic Nucleic Acid
aaaucacacugaugaggccguuaggccgaaauagaaau

SEQ ID NO: 11836 - RNA, 38 nt, Artificial Sequence
  Description of Artificial Sequence:  Enzymatic Nucleic Acid
acaauugacugaugaggccguuaggccgaaaucacaga

SEQ ID NO: 11837 - RNA, 38 nt, Artificial Sequence
  Description of Artificial Sequence:  Enzymatic Nucleic Acid
cacaauugcugaugaggccguuaggccgaaaaucacag

SEQ ID NO: 11838 - RNA, 38 nt, Artificial Sequence
  Description of Artificial Sequence:  Enzymatic Nucleic Acid
ccacaauucugaugaggccguuaggccgaaaaaucaca

SEQ ID NO: 11839 - RNA, 38 nt, Artificial Sequence
  Description of Artificial Sequence:  Enzymatic Nucleic Acid
ggguccaccugaugaggccguuaggccgaaauugaaau

SEQ ID NO: 11840 - RNA, 38 nt, Artificial Sequence
  Description of Artificial Sequence:  Enzymatic Nucleic Acid
aaaaaucccugaugaggccguuaggccgaaagggucca

SEQ ID NO: 11841 - RNA, 38 nt, Artificial Sequence
  Description of Artificial Sequence:  Enzymatic Nucleic Acid
augauaaacugaugaggccguuaggccgaaauccaagg

SEQ ID NO: 11842 - RNA, 38 nt, Artificial Sequence
  Description of Artificial Sequence:  Enzymatic Nucleic Acid
aaugauaacugaugaggccguuaggccgaaaauccaag

SEQ ID NO: 11843 - RNA, 38 nt, Artificial Sequence
  Description of Artificial Sequence:  Enzymatic Nucleic Acid
aaaugauacugaugaggccguuaggccgaaaaauccaa

SEQ ID NO: 11844 - RNA, 38 nt, Artificial Sequence
  Description of Artificial Sequence:  Enzymatic Nucleic Acid
aaaaugaucugaugaggccguuaggccgaaaaaaucca

SEQ ID NO: 11845 - RNA, 38 nt, Artificial Sequence
  Description of Artificial Sequence:  Enzymatic Nucleic Acid
gaaaaugacugaugaggccguuaggccgaaaaaaaucc

SEQ ID NO: 11846 - RNA, 38 nt, Artificial Sequence
  Description of Artificial Sequence:  Enzymatic Nucleic Acid
cugaaaaucugaugaggccguuaggccgaaauaaaaau

SEQ ID NO: 11847 - RNA, 38 nt, Artificial Sequence
  Description of Artificial Sequence:  Enzymatic Nucleic Acid
gaucugaacugaugaggccguuaggccgaaaugauaaa

SEQ ID NO: 11848 - RNA, 38 nt, Artificial Sequence
  Description of Artificial Sequence:  Enzymatic Nucleic Acid
agaucugacugaugaggccguuaggccgaaaaugauaa

SEQ ID NO: 11849 - RNA, 38 nt, Artificial Sequence
  Description of Artificial Sequence:  Enzymatic Nucleic Acid
gagaucugcugaugaggccguuaggccgaaaaaugaua

SEQ ID NO: 11850 - RNA, 38 nt, Artificial Sequence
  Description of Artificial Sequence:  Enzymatic Nucleic Acid
ggagaucucugaugaggccguuaggccgaaaaaaugau

SEQ ID NO: 11851 - RNA, 38 nt, Artificial Sequence
  Description of Artificial Sequence:  Enzymatic Nucleic Acid
auacuggacugaugaggccguuaggccgaaaucugaaa

SEQ ID NO: 11852 - RNA, 38 nt, Artificial Sequence
  Description of Artificial Sequence:  Enzymatic Nucleic Acid
aaauacugcugaugaggccguuaggccgaaagaucuga

SEQ ID NO: 11853 - RNA, 38 nt, Artificial Sequence
  Description of Artificial Sequence:  Enzymatic Nucleic Acid
auccgaaacugaugaggccguuaggccgaaacuggaga

SEQ ID NO: 11854 - RNA, 38 nt, Artificial Sequence
  Description of Artificial Sequence:  Enzymatic Nucleic Acid
auauccgacugaugaggccguuaggccgaaauacugga

SEQ ID NO: 11855 - RNA, 38 nt, Artificial Sequence
  Description of Artificial Sequence:  Enzymatic Nucleic Acid
aauauccgcugaugaggccguuaggccgaaaauacugg

SEQ ID NO: 11856 - RNA, 38 nt, Artificial Sequence
  Description of Artificial Sequence:  Enzymatic Nucleic Acid
aaauaucccugaugaggccguuaggccgaaaaauacug

SEQ ID NO: 11857 - RNA, 38 nt, Artificial Sequence
  Description of Artificial Sequence:  Enzymatic Nucleic Acid
ugaaaaaacugaugaggccguuaggccgaaauccgaaa

SEQ ID NO: 11858 - RNA, 38 nt, Artificial Sequence
  Description of Artificial Sequence:  Enzymatic Nucleic Acid
ugugaaaacugaugaggccguuaggccgaaauauccga

SEQ ID NO: 11859 - RNA, 38 nt, Artificial Sequence
  Description of Artificial Sequence:  Enzymatic Nucleic Acid
uugugaaacugaugaggccguuaggccgaaaauauccg

SEQ ID NO: 11860 - RNA, 38 nt, Artificial Sequence
  Description of Artificial Sequence:  Enzymatic Nucleic Acid
cuugugaacugaugaggccguuaggccgaaaaauaucc

SEQ ID NO: 11861 - RNA, 38 nt, Artificial Sequence
  Description of Artificial Sequence:  Enzymatic Nucleic Acid
ucuugugacugaugaggccguuaggccgaaaaaauauc

SEQ ID NO: 11862 - RNA, 38 nt, Artificial Sequence
  Description of Artificial Sequence:  Enzymatic Nucleic Acid
aucuugugcugaugaggccguuaggccgaaaaaaauau

SEQ ID NO: 11863 - RNA, 38 nt, Artificial Sequence
  Description of Artificial Sequence:  Enzymatic Nucleic Acid
aaucuugucugaugaggccguuaggccgaaaaaaaaua

SEQ ID NO: 11864 - RNA, 38 nt, Artificial Sequence
  Description of Artificial Sequence:  Enzymatic Nucleic Acid
cuaaugaacugaugaggccguuaggccgaaaucuugug

SEQ ID NO: 11865 - RNA, 38 nt, Artificial Sequence
  Description of Artificial Sequence:  Enzymatic Nucleic Acid
ucuaaugacugaugaggccguuaggccgaaaaucuugu

SEQ ID NO: 11866 - RNA, 38 nt, Artificial Sequence
  Description of Artificial Sequence:  Enzymatic Nucleic Acid
gucuaaugcugaugaggccguuaggccgaaaaaucuug

SEQ ID NO: 11867 - RNA, 38 nt, Artificial Sequence
  Description of Artificial Sequence:  Enzymatic Nucleic Acid
ggucuaaucugaugaggccguuaggccgaaaaaaucuu

SEQ ID NO: 11868 - RNA, 38 nt, Artificial Sequence
  Description of Artificial Sequence:  Enzymatic Nucleic Acid
agaggucucugaugaggccguuaggccgaaaugaaaau

SEQ ID NO: 11869 - RNA, 38 nt, Artificial Sequence
  Description of Artificial Sequence:  Enzymatic Nucleic Acid
aagagguccugaugaggccguuaggccgaaaaugaaaa

SEQ ID NO: 11870 - RNA, 38 nt, Artificial Sequence
  Description of Artificial Sequence:  Enzymatic Nucleic Acid
guaccuaacugaugaggccguuaggccgaaaggucuaa

SEQ ID NO: 11871 - RNA, 38 nt, Artificial Sequence
  Description of Artificial Sequence:  Enzymatic Nucleic Acid
cuguaccucugaugaggccguuaggccgaaagaggucu

SEQ ID NO: 11872 - RNA, 38 nt, Artificial Sequence
  Description of Artificial Sequence:  Enzymatic Nucleic Acid
ccuguacccugaugaggccguuaggccgaaaagagguc

SEQ ID NO: 11873 - RNA, 38 nt, Artificial Sequence
  Description of Artificial Sequence:  Enzymatic Nucleic Acid
ggcuccugcugaugaggccguuaggccgaaaccuaaga

SEQ ID NO: 11874 - RNA, 38 nt, Artificial Sequence
  Description of Artificial Sequence:  Enzymatic Nucleic Acid
guuaguggcugaugaggccguuaggccgaaauugcugc

SEQ ID NO: 11875 - RNA, 38 nt, Artificial Sequence
  Description of Artificial Sequence:  Enzymatic Nucleic Acid
uguuagugcugaugaggccguuaggccgaaaauugcug

SEQ ID NO: 11876 - RNA, 38 nt, Artificial Sequence
  Description of Artificial Sequence:  Enzymatic Nucleic Acid
uuccaugucugaugaggccguuaggccgaaaguggaau

SEQ ID NO: 11877 - RNA, 38 nt, Artificial Sequence
  Description of Artificial Sequence:  Enzymatic Nucleic Acid
acagacugcugaugaggccguuaggccgaaauuccaug

SEQ ID NO: 11878 - RNA, 38 nt, Artificial Sequence
  Description of Artificial Sequence:  Enzymatic Nucleic Acid
cugucacacugaugaggccguuaggccgaaacuggauu

SEQ ID NO: 11879 - RNA, 38 nt, Artificial Sequence
  Description of Artificial Sequence:  Enzymatic Nucleic Acid
gagugaaacugaugaggccguuaggccgaaacacuguc

SEQ ID NO: 11880 - RNA, 38 nt, Artificial Sequence
  Description of Artificial Sequence:  Enzymatic Nucleic Acid
agagugaacugaugaggccguuaggccgaaaacacugu

SEQ ID NO: 11881 - RNA, 38 nt, Artificial Sequence
  Description of Artificial Sequence:  Enzymatic Nucleic Acid
cagagugacugaugaggccguuaggccgaaaaacacug

SEQ ID NO: 11882 - RNA, 38 nt, Artificial Sequence
  Description of Artificial Sequence:  Enzymatic Nucleic Acid
acagagugcugaugaggccguuaggccgaaaaaacacu

SEQ ID NO: 11883 - RNA, 38 nt, Artificial Sequence
  Description of Artificial Sequence:  Enzymatic Nucleic Acid
cacagagucugaugaggccguuaggccgaaaaaaacac

SEQ ID NO: 11884 - RNA, 38 nt, Artificial Sequence
  Description of Artificial Sequence:  Enzymatic Nucleic Acid
uuaccacacugaugaggccguuaggccgaaagugaaaa

SEQ ID NO: 11885 - RNA, 38 nt, Artificial Sequence
  Description of Artificial Sequence:  Enzymatic Nucleic Acid
ccucagcucugaugaggccguuaggccgaaaccacaga

SEQ ID NO: 11886 - RNA, 38 nt, Artificial Sequence
  Description of Artificial Sequence:  Enzymatic Nucleic Acid
augugacacugaugaggccguuaggccgaaauuccuca

SEQ ID NO: 11887 - RNA, 38 nt, Artificial Sequence
  Description of Artificial Sequence:  Enzymatic Nucleic Acid
gaaaaugucugaugaggccguuaggccgaaacauauuc

SEQ ID NO: 11888 - RNA, 38 nt, Artificial Sequence
  Description of Artificial Sequence:  Enzymatic Nucleic Acid
ugacugaacugaugaggccguuaggccgaaaugugaca

SEQ ID NO: 11889 - RNA, 38 nt, Artificial Sequence
  Description of Artificial Sequence:  Enzymatic Nucleic Acid
uugacugacugaugaggccguuaggccgaaaaugugac

SEQ ID NO: 11890 - RNA, 38 nt, Artificial Sequence
  Description of Artificial Sequence:  Enzymatic Nucleic Acid
uuugacugcugaugaggccguuaggccgaaaaauguga

SEQ ID NO: 11891 - RNA, 38 nt, Artificial Sequence
  Description of Artificial Sequence:  Enzymatic Nucleic Acid
cuuugacucugaugaggccguuaggccgaaaaaaugug

SEQ ID NO: 11892 - RNA, 38 nt, Artificial Sequence
  Description of Artificial Sequence:  Enzymatic Nucleic Acid
gguucuuucugaugaggccguuaggccgaaacugaaaa

SEQ ID NO: 11893 - RNA, 38 nt, Artificial Sequence
  Description of Artificial Sequence:  Enzymatic Nucleic Acid
  misc_feature (31)..(31): n stands for inosine
aggaaaaucugaugaggccguuaggccgaanccagaau

SEQ ID NO: 11894 - RNA, 38 nt, Artificial Sequence
  Description of Artificial Sequence:  Enzymatic Nucleic Acid
  misc_feature (31)..(31): n stands for inosine
cggcaggacugaugaggccguuaggccgaanaaaauag

SEQ ID NO: 11895 - RNA, 38 nt, Artificial Sequence
  Description of Artificial Sequence:  Enzymatic Nucleic Acid
  misc_feature (31)..(31): n stands for inosine
acggcaggcugaugaggccguuaggccgaangaaaaua

SEQ ID NO: 11896 - RNA, 38 nt, Artificial Sequence
  Description of Artificial Sequence:  Enzymatic Nucleic Acid
  misc_feature (31)..(31): n stands for inosine
gaacggcacugaugaggccguuaggccgaanaggaaaa

SEQ ID NO: 11897 - RNA, 38 nt, Artificial Sequence
  Description of Artificial Sequence:  Enzymatic Nucleic Acid
  misc_feature (31)..(31): n stands for inosine
ggaacggccugaugaggccguuaggccgaangaggaaa

SEQ ID NO: 11898 - RNA, 38 nt, Artificial Sequence
  Description of Artificial Sequence:  Enzymatic Nucleic Acid
  misc_feature (31)..(31): n stands for inosine
gucggaaccugaugaggccguuaggccgaancaggagg

SEQ ID NO: 11899 - RNA, 38 nt, Artificial Sequence
  Description of Artificial Sequence:  Enzymatic Nucleic Acid
  misc_feature (31)..(31): n stands for inosine
gccgaguccugaugaggccguuaggccgaanaacggca

SEQ ID NO: 11900 - RNA, 38 nt, Artificial Sequence
  Description of Artificial Sequence:  Enzymatic Nucleic Acid
  misc_feature (31)..(31): n stands for inosine
uggugccgcugaugaggccguuaggccgaanucggaac

SEQ ID NO: 11901 - RNA, 38 nt, Artificial Sequence
  Description of Artificial Sequence:  Enzymatic Nucleic Acid
  misc_feature (31)..(31): n stands for inosine
gacucuggcugaugaggccguuaggccgaanccgaguc

SEQ ID NO: 11902 - RNA, 38 nt, Artificial Sequence
  Description of Artificial Sequence:  Enzymatic Nucleic Acid
  misc_feature (31)..(31): n stands for inosine
cagacucucugaugaggccguuaggccgaanugccgag

SEQ ID NO: 11903 - RNA, 38 nt, Artificial Sequence
  Description of Artificial Sequence:  Enzymatic Nucleic Acid
  misc_feature (31)..(31): n stands for inosine
acagacuccugaugaggccguuaggccgaangugccga

SEQ ID NO: 11904 - RNA, 38 nt, Artificial Sequence
  Description of Artificial Sequence:  Enzymatic Nucleic Acid
  misc_feature (31)..(31): n stands for inosine
guagagaccugaugaggccguuaggccgaanacucugg

SEQ ID NO: 11905 - RNA, 38 nt, Artificial Sequence
  Description of Artificial Sequence:  Enzymatic Nucleic Acid
  misc_feature (31)..(31): n stands for inosine
cucaguagcugaugaggccguuaggccgaanacagacu

SEQ ID NO: 11906 - RNA, 38 nt, Artificial Sequence
  Description of Artificial Sequence:  Enzymatic Nucleic Acid
  misc_feature (31)..(31): n stands for inosine
uucucagucugaugaggccguuaggccgaanagacaga

SEQ ID NO: 11907 - RNA, 38 nt, Artificial Sequence
  Description of Artificial Sequence:  Enzymatic Nucleic Acid
  misc_feature (31)..(31): n stands for inosine
gcguucuccugaugaggccguuaggccgaanuagagac

SEQ ID NO: 11908 - RNA, 38 nt, Artificial Sequence
  Description of Artificial Sequence:  Enzymatic Nucleic Acid
  misc_feature (31)..(31): n stands for inosine
ugacgcgccugaugaggccguuaggccgaancguucuc

SEQ ID NO: 11909 - RNA, 38 nt, Artificial Sequence
  Description of Artificial Sequence:  Enzymatic Nucleic Acid
  misc_feature (31)..(31): n stands for inosine
cucggccccugaugaggccguuaggccgaanacgcgcu

SEQ ID NO: 11910 - RNA, 38 nt, Artificial Sequence
  Description of Artificial Sequence:  Enzymatic Nucleic Acid
  misc_feature (31)..(31): n stands for inosine
aagagcuccugaugaggccguuaggccgaancccugac

SEQ ID NO: 11911 - RNA, 38 nt, Artificial Sequence
  Description of Artificial Sequence:  Enzymatic Nucleic Acid
  misc_feature (31)..(31): n stands for inosine
cagugaagcugaugaggccguuaggccgaancucggcc

SEQ ID NO: 11912 - RNA, 38 nt, Artificial Sequence
  Description of Artificial Sequence:  Enzymatic Nucleic Acid
  misc_feature (31)..(31): n stands for inosine
gccagugacugaugaggccguuaggccgaanagcucgg

SEQ ID NO: 11913 - RNA, 38 nt, Artificial Sequence
  Description of Artificial Sequence:  Enzymatic Nucleic Acid
  misc_feature (31)..(31): n stands for inosine
caggccagcugaugaggccguuaggccgaanaagagcu

SEQ ID NO: 11914 - RNA, 38 nt, Artificial Sequence
  Description of Artificial Sequence:  Enzymatic Nucleic Acid
  misc_feature (31)..(31): n stands for inosine
agcaggcccugaugaggccguuaggccgaanugaagag

SEQ ID NO: 11915 - RNA, 38 nt, Artificial Sequence
  Description of Artificial Sequence:  Enzymatic Nucleic Acid
  misc_feature (31)..(31): n stands for inosine
gcggagcacugaugaggccguuaggccgaanccaguga

SEQ ID NO: 11916 - RNA, 38 nt, Artificial Sequence
  Description of Artificial Sequence:  Enzymatic Nucleic Acid
  misc_feature (31)..(31): n stands for inosine
cgcggagccugaugaggccguuaggccgaangccagug

SEQ ID NO: 11917 - RNA, 38 nt, Artificial Sequence
  Description of Artificial Sequence:  Enzymatic Nucleic Acid
  misc_feature (31)..(31): n stands for inosine
gagcgcggcugaugaggccguuaggccgaancaggcca

SEQ ID NO: 11918 - RNA, 38 nt, Artificial Sequence
  Description of Artificial Sequence:  Enzymatic Nucleic Acid
  misc_feature (31)..(31): n stands for inosine
aagagcgccugaugaggccguuaggccgaanagcaggc

SEQ ID NO: 11919 - RNA, 38 nt, Artificial Sequence
  Description of Artificial Sequence:  Enzymatic Nucleic Acid
  misc_feature (31)..(31): n stands for inosine
cauugaagcugaugaggccguuaggccgaancgcggag

SEQ ID NO: 11920 - RNA, 38 nt, Artificial Sequence
  Description of Artificial Sequence:  Enzymatic Nucleic Acid
  misc_feature (31)..(31): n stands for inosine
ggcauugacugaugaggccguuaggccgaanagcgcgg

SEQ ID NO: 11921 - RNA, 38 nt, Artificial Sequence
  Description of Artificial Sequence:  Enzymatic Nucleic Acid
  misc_feature (31)..(31): n stands for inosine
gcuggcaucugaugaggccguuaggccgaanaagagcg

SEQ ID NO: 11922 - RNA, 38 nt, Artificial Sequence
  Description of Artificial Sequence:  Enzymatic Nucleic Acid
  misc_feature (31)..(31): n stands for inosine
cuggcgcucugaugaggccguuaggccgaancauugaa

SEQ ID NO: 11923 - RNA, 38 nt, Artificial Sequence
  Description of Artificial Sequence:  Enzymatic Nucleic Acid
  misc_feature (31)..(31): n stands for inosine
ccuggcgccugaugaggccguuaggccgaangcauuga

SEQ ID NO: 11924 - RNA, 38 nt, Artificial Sequence
  Description of Artificial Sequence:  Enzymatic Nucleic Acid
  misc_feature (31)..(31): n stands for inosine
gagcgccucugaugaggccguuaggccgaancgcuggc

SEQ ID NO: 11925 - RNA, 38 nt, Artificial Sequence
  Description of Artificial Sequence:  Enzymatic Nucleic Acid
  misc_feature (31)..(31): n stands for inosine
ugagcgcccugaugaggccguuaggccgaangcgcugg

SEQ ID NO: 11926 - RNA, 38 nt, Artificial Sequence
  Description of Artificial Sequence:  Enzymatic Nucleic Acid
  misc_feature (31)..(31): n stands for inosine
gcagggugcugaugaggccguuaggccgaancgccugg

SEQ ID NO: 11927 - RNA, 38 nt, Artificial Sequence
  Description of Artificial Sequence:  Enzymatic Nucleic Acid
  misc_feature (31)..(31): n stands for inosine
cugcagggcugaugaggccguuaggccgaanagcgccu

SEQ ID NO: 11928 - RNA, 38 nt, Artificial Sequence
  Description of Artificial Sequence:  Enzymatic Nucleic Acid
  misc_feature (31)..(31): n stands for inosine
cucugcagcugaugaggccguuaggccgaanugagcgc

SEQ ID NO: 11929 - RNA, 38 nt, Artificial Sequence
  Description of Artificial Sequence:  Enzymatic Nucleic Acid
  misc_feature (31)..(31): n stands for inosine
gcucugcacugaugaggccguuaggccgaangugagcg

SEQ ID NO: 11930 - RNA, 38 nt, Artificial Sequence
  Description of Artificial Sequence:  Enzymatic Nucleic Acid
  misc_feature (31)..(31): n stands for inosine
cgcucugccugaugaggccguuaggccgaanggugagc

SEQ ID NO: 11931 - RNA, 38 nt, Artificial Sequence
  Description of Artificial Sequence:  Enzymatic Nucleic Acid
  misc_feature (31)..(31): n stands for inosine
ggacgcuccugaugaggccguuaggccgaancagggug

SEQ ID NO: 11932 - RNA, 38 nt, Artificial Sequence
  Description of Artificial Sequence:  Enzymatic Nucleic Acid
  misc_feature (31)..(31): n stands for inosine
gagaggcgcugaugaggccguuaggccgaanacgcucu

SEQ ID NO: 11933 - RNA, 38 nt, Artificial Sequence
  Description of Artificial Sequence:  Enzymatic Nucleic Acid
  misc_feature (31)..(31): n stands for inosine
ugagaggccugaugaggccguuaggccgaangacgcuc

SEQ ID NO: 11934 - RNA, 38 nt, Artificial Sequence
  Description of Artificial Sequence:  Enzymatic Nucleic Acid
  misc_feature (31)..(31): n stands for inosine
cuuugagacugaugaggccguuaggccgaancgggacg

SEQ ID NO: 11935 - RNA, 38 nt, Artificial Sequence
  Description of Artificial Sequence:  Enzymatic Nucleic Acid
  misc_feature (31)..(31): n stands for inosine
ucuuugagcugaugaggccguuaggccgaangcgggac

SEQ ID NO: 11936 - RNA, 38 nt, Artificial Sequence
  Description of Artificial Sequence:  Enzymatic Nucleic Acid
  misc_feature (31)..(31): n stands for inosine
ccucuuugcugaugaggccguuaggccgaanaggcggg

SEQ ID NO: 11937 - RNA, 38 nt, Artificial Sequence
  Description of Artificial Sequence:  Enzymatic Nucleic Acid
  misc_feature (31)..(31): n stands for inosine
ccccucuucugaugaggccguuaggccgaanagaggcg

SEQ ID NO: 11938 - RNA, 38 nt, Artificial Sequence
  Description of Artificial Sequence:  Enzymatic Nucleic Acid
  misc_feature (31)..(31): n stands for inosine
aacucgcgcugaugaggccguuaggccgaanucacacc

SEQ ID NO: 11939 - RNA, 38 nt, Artificial Sequence
  Description of Artificial Sequence:  Enzymatic Nucleic Acid
  misc_feature (31)..(31): n stands for inosine
aaacucgccugaugaggccguuaggccgaangucacac

SEQ ID NO: 11940 - RNA, 38 nt, Artificial Sequence
  Description of Artificial Sequence:  Enzymatic Nucleic Acid
  misc_feature (31)..(31): n stands for inosine
ccacggcacugaugaggccguuaggccgaanaaccucc

SEQ ID NO: 11941 - RNA, 38 nt, Artificial Sequence
  Description of Artificial Sequence:  Enzymatic Nucleic Acid
  misc_feature (31)..(31): n stands for inosine
cccacggccugaugaggccguuaggccgaangaaccuc

SEQ ID NO: 11942 - RNA, 38 nt, Artificial Sequence
  Description of Artificial Sequence:  Enzymatic Nucleic Acid
  misc_feature (31)..(31): n stands for inosine
uuccccaccugaugaggccguuaggccgaancaggaac

SEQ ID NO: 11943 - RNA, 38 nt, Artificial Sequence
  Description of Artificial Sequence:  Enzymatic Nucleic Acid
  misc_feature (31)..(31): n stands for inosine
cggcggggcugaugaggccguuaggccgaanuucccca

SEQ ID NO: 11944 - RNA, 38 nt, Artificial Sequence
  Description of Artificial Sequence:  Enzymatic Nucleic Acid
  misc_feature (31)..(31): n stands for inosine
ggcggcggcugaugaggccguuaggccgaanuguuccc

SEQ ID NO: 11945 - RNA, 38 nt, Artificial Sequence
  Description of Artificial Sequence:  Enzymatic Nucleic Acid
  misc_feature (31)..(31): n stands for inosine
gggcggcgcugaugaggccguuaggccgaanguguucc

SEQ ID NO: 11946 - RNA, 38 nt, Artificial Sequence
  Description of Artificial Sequence:  Enzymatic Nucleic Acid
  misc_feature (31)..(31): n stands for inosine
agggcggccugaugaggccguuaggccgaangguguuc

SEQ ID NO: 11947 - RNA, 38 nt, Artificial Sequence
  Description of Artificial Sequence:  Enzymatic Nucleic Acid
  misc_feature (31)..(31): n stands for inosine
ccgagggccugaugaggccguuaggccgaancggggug

SEQ ID NO: 11948 - RNA, 38 nt, Artificial Sequence
  Description of Artificial Sequence:  Enzymatic Nucleic Acid
  misc_feature (31)..(31): n stands for inosine
gcuccgagcugaugaggccguuaggccgaancggcggg

SEQ ID NO: 11949 - RNA, 38 nt, Artificial Sequence
  Description of Artificial Sequence:  Enzymatic Nucleic Acid
  misc_feature (31)..(31): n stands for inosine
agcuccgacugaugaggccguuaggccgaangcggcgg

SEQ ID NO: 11950 - RNA, 38 nt, Artificial Sequence
  Description of Artificial Sequence:  Enzymatic Nucleic Acid
  misc_feature (31)..(31): n stands for inosine
aagcuccgcugaugaggccguuaggccgaanggcggcg

SEQ ID NO: 11951 - RNA, 38 nt, Artificial Sequence
  Description of Artificial Sequence:  Enzymatic Nucleic Acid
  misc_feature (31)..(31): n stands for inosine
acagaaaacugaugaggccguuaggccgaancuccgag

SEQ ID NO: 11952 - RNA, 38 nt, Artificial Sequence
  Description of Artificial Sequence:  Enzymatic Nucleic Acid
  misc_feature (31)..(31): n stands for inosine
ugcgccaccugaugaggccguuaggccgaanaaaaagc

SEQ ID NO: 11953 - RNA, 38 nt, Artificial Sequence
  Description of Artificial Sequence:  Enzymatic Nucleic Acid
  misc_feature (31)..(31): n stands for inosine
ggagaagccugaugaggccguuaggccgaancgccaca

SEQ ID NO: 11954 - RNA, 38 nt, Artificial Sequence
  Description of Artificial Sequence:  Enzymatic Nucleic Acid
  misc_feature (31)..(31): n stands for inosine
ggcggagacugaugaggccguuaggccgaancugcgcc

SEQ ID NO: 11955 - RNA, 38 nt, Artificial Sequence
  Description of Artificial Sequence:  Enzymatic Nucleic Acid
  misc_feature (31)..(31): n stands for inosine
ucgggcggcugaugaggccguuaggccgaanaagcugc

SEQ ID NO: 11956 - RNA, 38 nt, Artificial Sequence
  Description of Artificial Sequence:  Enzymatic Nucleic Acid
  misc_feature (31)..(31): n stands for inosine
gcucgggccugaugaggccguuaggccgaanagaagcu

SEQ ID NO: 11957 - RNA, 38 nt, Artificial Sequence
  Description of Artificial Sequence:  Enzymatic Nucleic Acid
  misc_feature (31)..(31): n stands for inosine
gcggcucgcugaugaggccguuaggccgaancggagaa

SEQ ID NO: 11958 - RNA, 38 nt, Artificial Sequence
  Description of Artificial Sequence:  Enzymatic Nucleic Acid
  misc_feature (31)..(31): n stands for inosine
cgcggcuccugaugaggccguuaggccgaangcggaga

SEQ ID NO: 11959 - RNA, 38 nt, Artificial Sequence
  Description of Artificial Sequence:  Enzymatic Nucleic Acid
  misc_feature (31)..(31): n stands for inosine
ccgcgcgccugaugaggccguuaggccgaancucgggc

SEQ ID NO: 11960 - RNA, 38 nt, Artificial Sequence
  Description of Artificial Sequence:  Enzymatic Nucleic Acid
  misc_feature (31)..(31): n stands for inosine
cccccggccugaugaggccguuaggccgaancuccgcg

SEQ ID NO: 11961 - RNA, 38 nt, Artificial Sequence
  Description of Artificial Sequence:  Enzymatic Nucleic Acid
  misc_feature (31)..(31): n stands for inosine
gagccccccugaugaggccguuaggccgaancagcucc

SEQ ID NO: 11962 - RNA, 38 nt, Artificial Sequence
  Description of Artificial Sequence:  Enzymatic Nucleic Acid
  misc_feature (31)..(31): n stands for inosine
ugcuaaggcugaugaggccguuaggccgaancccccgg

SEQ ID NO: 11963 - RNA, 38 nt, Artificial Sequence
  Description of Artificial Sequence:  Enzymatic Nucleic Acid
  misc_feature (31)..(31): n stands for inosine
ggugcuaacugaugaggccguuaggccgaanagccccc

SEQ ID NO: 11964 - RNA, 38 nt, Artificial Sequence
  Description of Artificial Sequence:  Enzymatic Nucleic Acid
  misc_feature (31)..(31): n stands for inosine
gggugcuacugaugaggccguuaggccgaangagcccc

SEQ ID NO: 11965 - RNA, 38 nt, Artificial Sequence
  Description of Artificial Sequence:  Enzymatic Nucleic Acid
  misc_feature (31)..(31): n stands for inosine
cgcccgggcugaugaggccguuaggccgaancuaagga

SEQ ID NO: 11966 - RNA, 38 nt, Artificial Sequence
  Description of Artificial Sequence:  Enzymatic Nucleic Acid
  misc_feature (31)..(31): n stands for inosine
ggcgcccgcugaugaggccguuaggccgaanugcuaag

SEQ ID NO: 11967 - RNA, 38 nt, Artificial Sequence
  Description of Artificial Sequence:  Enzymatic Nucleic Acid
  misc_feature (31)..(31): n stands for inosine
cggcgccccugaugaggccguuaggccgaangugcuaa

SEQ ID NO: 11968 - RNA, 38 nt, Artificial Sequence
  Description of Artificial Sequence:  Enzymatic Nucleic Acid
  misc_feature (31)..(31): n stands for inosine
agggcccccugaugaggccguuaggccgaancgcccgg

SEQ ID NO: 11969 - RNA, 38 nt, Artificial Sequence
  Description of Artificial Sequence:  Enzymatic Nucleic Acid
  misc_feature (31)..(31): n stands for inosine
agggcgagcugaugaggccguuaggccgaanccccggc

SEQ ID NO: 11970 - RNA, 38 nt, Artificial Sequence
  Description of Artificial Sequence:  Enzymatic Nucleic Acid
  misc_feature (31)..(31): n stands for inosine
aagggcgacugaugaggccguuaggccgaangccccgg

SEQ ID NO: 11971 - RNA, 38 nt, Artificial Sequence
  Description of Artificial Sequence:  Enzymatic Nucleic Acid
  misc_feature (31)..(31): n stands for inosine
gaagggcgcugaugaggccguuaggccgaanggccccg

SEQ ID NO: 11972 - RNA, 38 nt, Artificial Sequence
  Description of Artificial Sequence:  Enzymatic Nucleic Acid
  misc_feature (31)..(31): n stands for inosine
ugcggaagcugaugaggccguuaggccgaancgagggc

SEQ ID NO: 11973 - RNA, 38 nt, Artificial Sequence
  Description of Artificial Sequence:  Enzymatic Nucleic Acid
  misc_feature (31)..(31): n stands for inosine
cugcggaacugaugaggccguuaggccgaangcgaggg

SEQ ID NO: 11974 - RNA, 38 nt, Artificial Sequence
  Description of Artificial Sequence:  Enzymatic Nucleic Acid
  misc_feature (31)..(31): n stands for inosine
gcugcggacugaugaggccguuaggccgaanggcgagg

SEQ ID NO: 11975 - RNA, 38 nt, Artificial Sequence
  Description of Artificial Sequence:  Enzymatic Nucleic Acid
  misc_feature (31)..(31): n stands for inosine
aaggcugccugaugaggccguuaggccgaanaagggcg

SEQ ID NO: 11976 - RNA, 38 nt, Artificial Sequence
  Description of Artificial Sequence:  Enzymatic Nucleic Acid
  misc_feature (31)..(31): n stands for inosine
gugaaggccugaugaggccguuaggccgaancggaagg

SEQ ID NO: 11977 - RNA, 38 nt, Artificial Sequence
  Description of Artificial Sequence:  Enzymatic Nucleic Acid
  misc_feature (31)..(31): n stands for inosine
ggagugaacugaugaggccguuaggccgaancugcgga

SEQ ID NO: 11978 - RNA, 38 nt, Artificial Sequence
  Description of Artificial Sequence:  Enzymatic Nucleic Acid
  misc_feature (31)..(31): n stands for inosine
uggagugacugaugaggccguuaggccgaangcugcgg

SEQ ID NO: 11979 - RNA, 38 nt, Artificial Sequence
  Description of Artificial Sequence:  Enzymatic Nucleic Acid
  misc_feature (31)..(31): n stands for inosine
ggcuggagcugaugaggccguuaggccgaanaaggcug

SEQ ID NO: 11980 - RNA, 38 nt, Artificial Sequence
  Description of Artificial Sequence:  Enzymatic Nucleic Acid
  misc_feature (31)..(31): n stands for inosine
agggcuggcugaugaggccguuaggccgaanugaaggc

SEQ ID NO: 11981 - RNA, 38 nt, Artificial Sequence
  Description of Artificial Sequence:  Enzymatic Nucleic Acid
  misc_feature (31)..(31): n stands for inosine
agagggcucugaugaggccguuaggccgaanagugaag

SEQ ID NO: 11982 - RNA, 38 nt, Artificial Sequence
  Description of Artificial Sequence:  Enzymatic Nucleic Acid
  misc_feature (31)..(31): n stands for inosine
cagagggccugaugaggccguuaggccgaangagugaa

SEQ ID NO: 11983 - RNA, 38 nt, Artificial Sequence
  Description of Artificial Sequence:  Enzymatic Nucleic Acid
  misc_feature (31)..(31): n stands for inosine
gagcagagcugaugaggccguuaggccgaancuggagu

SEQ ID NO: 11984 - RNA, 38 nt, Artificial Sequence
  Description of Artificial Sequence:  Enzymatic Nucleic Acid
  misc_feature (31)..(31): n stands for inosine
ggagcagacugaugaggccguuaggccgaangcuggag

SEQ ID NO: 11985 - RNA, 38 nt, Artificial Sequence
  Description of Artificial Sequence:  Enzymatic Nucleic Acid
  misc_feature (31)..(31): n stands for inosine
gggagcagcugaugaggccguuaggccgaanggcugga

SEQ ID NO: 11986 - RNA, 38 nt, Artificial Sequence
  Description of Artificial Sequence:  Enzymatic Nucleic Acid
  misc_feature (31)..(31): n stands for inosine
gcgggagccugaugaggccguuaggccgaanagggcug

SEQ ID NO: 11987 - RNA, 38 nt, Artificial Sequence
  Description of Artificial Sequence:  Enzymatic Nucleic Acid
  misc_feature (31)..(31): n stands for inosine
cgugcgggcugaugaggccguuaggccgaancagaggg

SEQ ID NO: 11988 - RNA, 38 nt, Artificial Sequence
  Description of Artificial Sequence:  Enzymatic Nucleic Acid
  misc_feature (31)..(31): n stands for inosine
ggcgugcgcugaugaggccguuaggccgaanagcagag

SEQ ID NO: 11989 - RNA, 38 nt, Artificial Sequence
  Description of Artificial Sequence:  Enzymatic Nucleic Acid
  misc_feature (31)..(31): n stands for inosine
uggcgugccugaugaggccguuaggccgaangagcaga

SEQ ID NO: 11990 - RNA, 38 nt, Artificial Sequence
  Description of Artificial Sequence:  Enzymatic Nucleic Acid
  misc_feature (31)..(31): n stands for inosine
ucauggcgcugaugaggccguuaggccgaancgggagc

SEQ ID NO: 11991 - RNA, 38 nt, Artificial Sequence
  Description of Artificial Sequence:  Enzymatic Nucleic Acid
  misc_feature (31)..(31): n stands for inosine
gacuucaucugaugaggccguuaggccgaancgugcgg

SEQ ID NO: 11992 - RNA, 38 nt, Artificial Sequence
  Description of Artificial Sequence:  Enzymatic Nucleic Acid
  misc_feature (31)..(31): n stands for inosine
cgacuucacugaugaggccguuaggccgaangcgugcg

SEQ ID NO: 11993 - RNA, 38 nt, Artificial Sequence
  Description of Artificial Sequence:  Enzymatic Nucleic Acid
  misc_feature (31)..(31): n stands for inosine
gguagaaccugaugaggccguuaggccgaancgacuuc

SEQ ID NO: 11994 - RNA, 38 nt, Artificial Sequence
  Description of Artificial Sequence:  Enzymatic Nucleic Acid
  misc_feature (31)..(31): n stands for inosine
gcagcggucugaugaggccguuaggccgaanaacggcg

SEQ ID NO: 11995 - RNA, 38 nt, Artificial Sequence
  Description of Artificial Sequence:  Enzymatic Nucleic Acid
  misc_feature (31)..(31): n stands for inosine
cuggcagccugaugaggccguuaggccgaanuagaacg

SEQ ID NO: 11996 - RNA, 38 nt, Artificial Sequence
  Description of Artificial Sequence:  Enzymatic Nucleic Acid
  misc_feature (31)..(31): n stands for inosine
guucuggccugaugaggccguuaggccgaancgguaga

SEQ ID NO: 11997 - RNA, 38 nt, Artificial Sequence
  Description of Artificial Sequence:  Enzymatic Nucleic Acid
  misc_feature (31)..(31): n stands for inosine
gguguucucugaugaggccguuaggccgaancagcggu

SEQ ID NO: 11998 - RNA, 38 nt, Artificial Sequence
  Description of Artificial Sequence:  Enzymatic Nucleic Acid
  misc_feature (31)..(31): n stands for inosine
ugguguuccugaugaggccguuaggccgaangcagcgg

SEQ ID NO: 11999 - RNA, 38 nt, Artificial Sequence
  Description of Artificial Sequence:  Enzymatic Nucleic Acid
  misc_feature (31)..(31): n stands for inosine
agagguggcugaugaggccguuaggccgaanuucuggc

SEQ ID NO: 12000 - RNA, 38 nt, Artificial Sequence
  Description of Artificial Sequence:  Enzymatic Nucleic Acid
  misc_feature (31)..(31): n stands for inosine
acagaggucugaugaggccguuaggccgaanuguucug

SEQ ID NO: 12001 - RNA, 38 nt, Artificial Sequence
  Description of Artificial Sequence:  Enzymatic Nucleic Acid
  misc_feature (31)..(31): n stands for inosine
cacagaggcugaugaggccguuaggccgaanguguucu

SEQ ID NO: 12002 - RNA, 38 nt, Artificial Sequence
  Description of Artificial Sequence:  Enzymatic Nucleic Acid
  misc_feature (31)..(31): n stands for inosine
uccacagacugaugaggccguuaggccgaanugguguu

SEQ ID NO: 12003 - RNA, 38 nt, Artificial Sequence
  Description of Artificial Sequence:  Enzymatic Nucleic Acid
  misc_feature (31)..(31): n stands for inosine
uuccacagcugaugaggccguuaggccgaanguggugu

SEQ ID NO: 12004 - RNA, 38 nt, Artificial Sequence
  Description of Artificial Sequence:  Enzymatic Nucleic Acid
  misc_feature (31)..(31): n stands for inosine
uuuuccaccugaugaggccguuaggccgaanagguggu

SEQ ID NO: 12005 - RNA, 38 nt, Artificial Sequence
  Description of Artificial Sequence:  Enzymatic Nucleic Acid
  misc_feature (31)..(31): n stands for inosine
cgccgagucugaugaggccguuaggccgaanccuuuuu

SEQ ID NO: 12006 - RNA, 38 nt, Artificial Sequence
  Description of Artificial Sequence:  Enzymatic Nucleic Acid
  misc_feature (31)..(31): n stands for inosine
caccgccgcugaugaggccguuaggccgaanuugccuu

SEQ ID NO: 12007 - RNA, 38 nt, Artificial Sequence
  Description of Artificial Sequence:  Enzymatic Nucleic Acid
  misc_feature (31)..(31): n stands for inosine
ugcugaagcugaugaggccguuaggccgaancaccccg

SEQ ID NO: 12008 - RNA, 38 nt, Artificial Sequence
  Description of Artificial Sequence:  Enzymatic Nucleic Acid
  misc_feature (31)..(31): n stands for inosine
ggugcugacugaugaggccguuaggccgaanagcaccc

SEQ ID NO: 12009 - RNA, 38 nt, Artificial Sequence
  Description of Artificial Sequence:  Enzymatic Nucleic Acid
  misc_feature (31)..(31): n stands for inosine
gccggugccugaugaggccguuaggccgaanaagagca

SEQ ID NO: 12010 - RNA, 38 nt, Artificial Sequence
  Description of Artificial Sequence:  Enzymatic Nucleic Acid
  misc_feature (31)..(31): n stands for inosine
gaggccggcugaugaggccguuaggccgaancugaaga

SEQ ID NO: 12011 - RNA, 38 nt, Artificial Sequence
  Description of Artificial Sequence:  Enzymatic Nucleic Acid
  misc_feature (31)..(31): n stands for inosine
aggaggcccugaugaggccguuaggccgaanugcugaa

SEQ ID NO: 12012 - RNA, 38 nt, Artificial Sequence
  Description of Artificial Sequence:  Enzymatic Nucleic Acid
  misc_feature (31)..(31): n stands for inosine
gcccaggacugaugaggccguuaggccgaanccggugc

SEQ ID NO: 12013 - RNA, 38 nt, Artificial Sequence
  Description of Artificial Sequence:  Enzymatic Nucleic Acid
  misc_feature (31)..(31): n stands for inosine
ugcccaggcugaugaggccguuaggccgaangccggug

SEQ ID NO: 12014 - RNA, 38 nt, Artificial Sequence
  Description of Artificial Sequence:  Enzymatic Nucleic Acid
  misc_feature (31)..(31): n stands for inosine
guugcccacugaugaggccguuaggccgaanaggccgg

SEQ ID NO: 12015 - RNA, 38 nt, Artificial Sequence
  Description of Artificial Sequence:  Enzymatic Nucleic Acid
  misc_feature (31)..(31): n stands for inosine
gguugccccugaugaggccguuaggccgaangaggccg

SEQ ID NO: 12016 - RNA, 38 nt, Artificial Sequence
  Description of Artificial Sequence:  Enzymatic Nucleic Acid
  misc_feature (31)..(31): n stands for inosine
cagcaggucugaugaggccguuaggccgaancccagga

SEQ ID NO: 12017 - RNA, 38 nt, Artificial Sequence
  Description of Artificial Sequence:  Enzymatic Nucleic Acid
  misc_feature (31)..(31): n stands for inosine
ggccagcacugaugaggccguuaggccgaanuugccca

SEQ ID NO: 12018 - RNA, 38 nt, Artificial Sequence
  Description of Artificial Sequence:  Enzymatic Nucleic Acid
  misc_feature (31)..(31): n stands for inosine
gggccagccugaugaggccguuaggccgaanguugccc

SEQ ID NO: 12019 - RNA, 38 nt, Artificial Sequence
  Description of Artificial Sequence:  Enzymatic Nucleic Acid
  misc_feature (31)..(31): n stands for inosine
ccagggcccugaugaggccguuaggccgaancagguug

SEQ ID NO: 12020 - RNA, 38 nt, Artificial Sequence
  Description of Artificial Sequence:  Enzymatic Nucleic Acid
  misc_feature (31)..(31): n stands for inosine
agccccagcugaugaggccguuaggccgaanccagcag

SEQ ID NO: 12021 - RNA, 38 nt, Artificial Sequence
  Description of Artificial Sequence:  Enzymatic Nucleic Acid
  misc_feature (31)..(31): n stands for inosine
cagccccacugaugaggccguuaggccgaangccagca

SEQ ID NO: 12022 - RNA, 38 nt, Artificial Sequence
  Description of Artificial Sequence:  Enzymatic Nucleic Acid
  misc_feature (31)..(31): n stands for inosine
gcagcccccugaugaggccguuaggccgaanggccagc

SEQ ID NO: 12023 - RNA, 38 nt, Artificial Sequence
  Description of Artificial Sequence:  Enzymatic Nucleic Acid
  misc_feature (31)..(31): n stands for inosine
gcgccagccugaugaggccguuaggccgaanccccagg

SEQ ID NO: 12024 - RNA, 38 nt, Artificial Sequence
  Description of Artificial Sequence:  Enzymatic Nucleic Acid
  misc_feature (31)..(31): n stands for inosine
agcgcgcccugaugaggccguuaggccgaancagcccc

SEQ ID NO: 12025 - RNA, 38 nt, Artificial Sequence
  Description of Artificial Sequence:  Enzymatic Nucleic Acid
  misc_feature (31)..(31): n stands for inosine
cagccccgcugaugaggccguuaggccgaancgcgcca

SEQ ID NO: 12026 - RNA, 38 nt, Artificial Sequence
  Description of Artificial Sequence:  Enzymatic Nucleic Acid
  misc_feature (31)..(31): n stands for inosine
accacccccugaugaggccguuaggccgaanccccgag

SEQ ID NO: 12027 - RNA, 38 nt, Artificial Sequence
  Description of Artificial Sequence:  Enzymatic Nucleic Acid
  misc_feature (31)..(31): n stands for inosine
acgccgcgcugaugaggccguuaggccgaancaccacc

SEQ ID NO: 12028 - RNA, 38 nt, Artificial Sequence
  Description of Artificial Sequence:  Enzymatic Nucleic Acid
  misc_feature (31)..(31): n stands for inosine
ggcgcagucugaugaggccguuaggccgaanacgccgc

SEQ ID NO: 12029 - RNA, 38 nt, Artificial Sequence
  Description of Artificial Sequence:  Enzymatic Nucleic Acid
  misc_feature (31)..(31): n stands for inosine
gggcgcagcugaugaggccguuaggccgaangacgccg

SEQ ID NO: 12030 - RNA, 38 nt, Artificial Sequence
  Description of Artificial Sequence:  Enzymatic Nucleic Acid
  misc_feature (31)..(31): n stands for inosine
gcgggcgccugaugaggccguuaggccgaanuggacgc

SEQ ID NO: 12031 - RNA, 38 nt, Artificial Sequence
  Description of Artificial Sequence:  Enzymatic Nucleic Acid
  misc_feature (31)..(31): n stands for inosine
gggcagcgcugaugaggccguuaggccgaancgcagug

SEQ ID NO: 12032 - RNA, 38 nt, Artificial Sequence
  Description of Artificial Sequence:  Enzymatic Nucleic Acid
  misc_feature (31)..(31): n stands for inosine
agggcagccugaugaggccguuaggccgaangcgcagu

SEQ ID NO: 12033 - RNA, 38 nt, Artificial Sequence
  Description of Artificial Sequence:  Enzymatic Nucleic Acid
  misc_feature (31)..(31): n stands for inosine
ccgagggccugaugaggccguuaggccgaancgggcgc

SEQ ID NO: 12034 - RNA, 38 nt, Artificial Sequence
  Description of Artificial Sequence:  Enzymatic Nucleic Acid
  misc_feature (31)..(31): n stands for inosine
agaccgagcugaugaggccguuaggccgaancagcggg

SEQ ID NO: 12035 - RNA, 38 nt, Artificial Sequence
  Description of Artificial Sequence:  Enzymatic Nucleic Acid
  misc_feature (31)..(31): n stands for inosine
aagaccgacugaugaggccguuaggccgaangcagcgg

SEQ ID NO: 12036 - RNA, 38 nt, Artificial Sequence
  Description of Artificial Sequence:  Enzymatic Nucleic Acid
  misc_feature (31)..(31): n stands for inosine
gaagaccgcugaugaggccguuaggccgaanggcagcg

SEQ ID NO: 12037 - RNA, 38 nt, Artificial Sequence
  Description of Artificial Sequence:  Enzymatic Nucleic Acid
  misc_feature (31)..(31): n stands for inosine
cauguagacugaugaggccguuaggccgaanaccgagg

SEQ ID NO: 12038 - RNA, 38 nt, Artificial Sequence
  Description of Artificial Sequence:  Enzymatic Nucleic Acid
  misc_feature (31)..(31): n stands for inosine
cagcaugucugaugaggccguuaggccgaanaagaccg

SEQ ID NO: 12039 - RNA, 38 nt, Artificial Sequence
  Description of Artificial Sequence:  Enzymatic Nucleic Acid
  misc_feature (31)..(31): n stands for inosine
caccagcacugaugaggccguuaggccgaanuagaaga

SEQ ID NO: 12040 - RNA, 38 nt, Artificial Sequence
  Description of Artificial Sequence:  Enzymatic Nucleic Acid
  misc_feature (31)..(31): n stands for inosine
cacacacccugaugaggccguuaggccgaancauguag

SEQ ID NO: 12041 - RNA, 38 nt, Artificial Sequence
  Description of Artificial Sequence:  Enzymatic Nucleic Acid
  misc_feature (31)..(31): n stands for inosine
gaccgucacugaugaggccguuaggccgaanccacaca

SEQ ID NO: 12042 - RNA, 38 nt, Artificial Sequence
  Description of Artificial Sequence:  Enzymatic Nucleic Acid
  misc_feature (31)..(31): n stands for inosine
ugaccguccugaugaggccguuaggccgaangccacac

SEQ ID NO: 12043 - RNA, 38 nt, Artificial Sequence
  Description of Artificial Sequence:  Enzymatic Nucleic Acid
  misc_feature (31)..(31): n stands for inosine
caagucggcugaugaggccguuaggccgaanaccguca

SEQ ID NO: 12044 - RNA, 38 nt, Artificial Sequence
  Description of Artificial Sequence:  Enzymatic Nucleic Acid
  misc_feature (31)..(31): n stands for inosine
agcaaguccugaugaggccguuaggccgaanugaccgu

SEQ ID NO: 12045 - RNA, 38 nt, Artificial Sequence
  Description of Artificial Sequence:  Enzymatic Nucleic Acid
  misc_feature (31)..(31): n stands for inosine
gcccagcacugaugaggccguuaggccgaanucgguga

SEQ ID NO: 12046 - RNA, 38 nt, Artificial Sequence
  Description of Artificial Sequence:  Enzymatic Nucleic Acid
  misc_feature (31)..(31): n stands for inosine
acuugccccugaugaggccguuaggccgaancaagucg

SEQ ID NO: 12047 - RNA, 38 nt, Artificial Sequence
  Description of Artificial Sequence:  Enzymatic Nucleic Acid
  misc_feature (31)..(31): n stands for inosine
gaggcacucugaugaggccguuaggccgaancccagca

SEQ ID NO: 12048 - RNA, 38 nt, Artificial Sequence
  Description of Artificial Sequence:  Enzymatic Nucleic Acid
  misc_feature (31)..(31): n stands for inosine
gcuuaggacugaugaggccguuaggccgaancacuugc

SEQ ID NO: 12049 - RNA, 38 nt, Artificial Sequence
  Description of Artificial Sequence:  Enzymatic Nucleic Acid
  misc_feature (31)..(31): n stands for inosine
ggcuuaggcugaugaggccguuaggccgaangcacuug

SEQ ID NO: 12050 - RNA, 38 nt, Artificial Sequence
  Description of Artificial Sequence:  Enzymatic Nucleic Acid
  misc_feature (31)..(31): n stands for inosine
cgggcuuacugaugaggccguuaggccgaanaggcacu

SEQ ID NO: 12051 - RNA, 38 nt, Artificial Sequence
  Description of Artificial Sequence:  Enzymatic Nucleic Acid
  misc_feature (31)..(31): n stands for inosine
ccgggcuucugaugaggccguuaggccgaangaggcac

SEQ ID NO: 12052 - RNA, 38 nt, Artificial Sequence
  Description of Artificial Sequence:  Enzymatic Nucleic Acid
  misc_feature (31)..(31): n stands for inosine
caccaccgcugaugaggccguuaggccgaancuuagga

SEQ ID NO: 12053 - RNA, 38 nt, Artificial Sequence
  Description of Artificial Sequence:  Enzymatic Nucleic Acid
  misc_feature (31)..(31): n stands for inosine
gcaccacccugaugaggccguuaggccgaangcuuagg

SEQ ID NO: 12054 - RNA, 38 nt, Artificial Sequence
  Description of Artificial Sequence:  Enzymatic Nucleic Acid
  misc_feature (31)..(31): n stands for inosine
aggcagcccugaugaggccguuaggccgaancaccacc

SEQ ID NO: 12055 - RNA, 38 nt, Artificial Sequence
  Description of Artificial Sequence:  Enzymatic Nucleic Acid
  misc_feature (31)..(31): n stands for inosine
gcguaggccugaugaggccguuaggccgaanccagcac

SEQ ID NO: 12056 - RNA, 38 nt, Artificial Sequence
  Description of Artificial Sequence:  Enzymatic Nucleic Acid
  misc_feature (31)..(31): n stands for inosine
ugagcguacugaugaggccguuaggccgaancagccag

SEQ ID NO: 12057 - RNA, 38 nt, Artificial Sequence
  Description of Artificial Sequence:  Enzymatic Nucleic Acid
  misc_feature (31)..(31): n stands for inosine
cugagcgucugaugaggccguuaggccgaangcagcca

SEQ ID NO: 12058 - RNA, 38 nt, Artificial Sequence
  Description of Artificial Sequence:  Enzymatic Nucleic Acid
  misc_feature (31)..(31): n stands for inosine
cgguucugcugaugaggccguuaggccgaancguaggc

SEQ ID NO: 12059 - RNA, 38 nt, Artificial Sequence
  Description of Artificial Sequence:  Enzymatic Nucleic Acid
  misc_feature (31)..(31): n stands for inosine
uccgguuccugaugaggccguuaggccgaanagcguag

SEQ ID NO: 12060 - RNA, 38 nt, Artificial Sequence
  Description of Artificial Sequence:  Enzymatic Nucleic Acid
  misc_feature (31)..(31): n stands for inosine
cagacucccugaugaggccguuaggccgaanuucugag

SEQ ID NO: 12061 - RNA, 38 nt, Artificial Sequence
  Description of Artificial Sequence:  Enzymatic Nucleic Acid
  misc_feature (31)..(31): n stands for inosine
gcacccgccugaugaggccguuaggccgaanacuccgg

SEQ ID NO: 12062 - RNA, 38 nt, Artificial Sequence
  Description of Artificial Sequence:  Enzymatic Nucleic Acid
  misc_feature (31)..(31): n stands for inosine
cgggcgcacugaugaggccguuaggccgaancacccgc

SEQ ID NO: 12063 - RNA, 38 nt, Artificial Sequence
  Description of Artificial Sequence:  Enzymatic Nucleic Acid
  misc_feature (31)..(31): n stands for inosine
ccaaugcgcugaugaggccguuaggccgaancgcaagc

SEQ ID NO: 12064 - RNA, 38 nt, Artificial Sequence
  Description of Artificial Sequence:  Enzymatic Nucleic Acid
  misc_feature (31)..(31): n stands for inosine
uccaaugccugaugaggccguuaggccgaangcgcaag

SEQ ID NO: 12065 - RNA, 38 nt, Artificial Sequence
  Description of Artificial Sequence:  Enzymatic Nucleic Acid
  misc_feature (31)..(31): n stands for inosine
uuguccaacugaugaggccguuaggccgaancgggcgc

SEQ ID NO: 12066 - RNA, 38 nt, Artificial Sequence
  Description of Artificial Sequence:  Enzymatic Nucleic Acid
  misc_feature (31)..(31): n stands for inosine
caacgagucugaugaggccguuaggccgaanuccaaug

SEQ ID NO: 12067 - RNA, 38 nt, Artificial Sequence
  Description of Artificial Sequence:  Enzymatic Nucleic Acid
  misc_feature (31)..(31): n stands for inosine
gcacaacgcugaugaggccguuaggccgaanuugucca

SEQ ID NO: 12068 - RNA, 38 nt, Artificial Sequence
  Description of Artificial Sequence:  Enzymatic Nucleic Acid
  misc_feature (31)..(31): n stands for inosine
gaaggcuucugaugaggccguuaggccgaancacaacg

SEQ ID NO: 12069 - RNA, 38 nt, Artificial Sequence
  Description of Artificial Sequence:  Enzymatic Nucleic Acid
  misc_feature (31)..(31): n stands for inosine
cgaaggcucugaugaggccguuaggccgaangcacaac

SEQ ID NO: 12070 - RNA, 38 nt, Artificial Sequence
  Description of Artificial Sequence:  Enzymatic Nucleic Acid
  misc_feature (31)..(31): n stands for inosine
aaggcgaacugaugaggccguuaggccgaancuuggca

SEQ ID NO: 12071 - RNA, 38 nt, Artificial Sequence
  Description of Artificial Sequence:  Enzymatic Nucleic Acid
  misc_feature (31)..(31): n stands for inosine
gaaggcgacugaugaggccguuaggccgaangcuuggc

SEQ ID NO: 12072 - RNA, 38 nt, Artificial Sequence
  Description of Artificial Sequence:  Enzymatic Nucleic Acid
  misc_feature (31)..(31): n stands for inosine
augaagaacugaugaggccguuaggccgaancgaaggc

SEQ ID NO: 12073 - RNA, 38 nt, Artificial Sequence
  Description of Artificial Sequence:  Enzymatic Nucleic Acid
  misc_feature (31)..(31): n stands for inosine
caugaagacugaugaggccguuaggccgaangcgaagg

SEQ ID NO: 12074 - RNA, 38 nt, Artificial Sequence
  Description of Artificial Sequence:  Enzymatic Nucleic Acid
  misc_feature (31)..(31): n stands for inosine
ggacaugacugaugaggccguuaggccgaanaaggcga

SEQ ID NO: 12075 - RNA, 38 nt, Artificial Sequence
  Description of Artificial Sequence:  Enzymatic Nucleic Acid
  misc_feature (31)..(31): n stands for inosine
gaaggacacugaugaggccguuaggccgaanaagaagg

SEQ ID NO: 12076 - RNA, 38 nt, Artificial Sequence
  Description of Artificial Sequence:  Enzymatic Nucleic Acid
  misc_feature (31)..(31): n stands for inosine
ccaaagaacugaugaggccguuaggccgaanacaugaa

SEQ ID NO: 12077 - RNA, 38 nt, Artificial Sequence
  Description of Artificial Sequence:  Enzymatic Nucleic Acid
  misc_feature (31)..(31): n stands for inosine
cccaaagacugaugaggccguuaggccgaangacauga

SEQ ID NO: 12078 - RNA, 38 nt, Artificial Sequence
  Description of Artificial Sequence:  Enzymatic Nucleic Acid
  misc_feature (31)..(31): n stands for inosine
gagcccaacugaugaggccguuaggccgaanaaggaca

SEQ ID NO: 12079 - RNA, 38 nt, Artificial Sequence
  Description of Artificial Sequence:  Enzymatic Nucleic Acid
  misc_feature (31)..(31): n stands for inosine
ucgaggagcugaugaggccguuaggccgaancccaaag

SEQ ID NO: 12080 - RNA, 38 nt, Artificial Sequence
  Description of Artificial Sequence:  Enzymatic Nucleic Acid
  misc_feature (31)..(31): n stands for inosine
ugucgaggcugaugaggccguuaggccgaanagcccaa

SEQ ID NO: 12081 - RNA, 38 nt, Artificial Sequence
  Description of Artificial Sequence:  Enzymatic Nucleic Acid
  misc_feature (31)..(31): n stands for inosine
agugucgacugaugaggccguuaggccgaanagagccc

SEQ ID NO: 12082 - RNA, 38 nt, Artificial Sequence
  Description of Artificial Sequence:  Enzymatic Nucleic Acid
  misc_feature (31)..(31): n stands for inosine
cagugucgcugaugaggccguuaggccgaangagagcc

SEQ ID NO: 12083 - RNA, 38 nt, Artificial Sequence
  Description of Artificial Sequence:  Enzymatic Nucleic Acid
  misc_feature (31)..(31): n stands for inosine
aguugcagcugaugaggccguuaggccgaanucgagga

SEQ ID NO: 12084 - RNA, 38 nt, Artificial Sequence
  Description of Artificial Sequence:  Enzymatic Nucleic Acid
  misc_feature (31)..(31): n stands for inosine
ggaguugccugaugaggccguuaggccgaanugucgag

SEQ ID NO: 12085 - RNA, 38 nt, Artificial Sequence
  Description of Artificial Sequence:  Enzymatic Nucleic Acid
  misc_feature (31)..(31): n stands for inosine
ccaggagucugaugaggccguuaggccgaancaguguc

SEQ ID NO: 12086 - RNA, 38 nt, Artificial Sequence
  Description of Artificial Sequence:  Enzymatic Nucleic Acid
  misc_feature (31)..(31): n stands for inosine
uggccaggcugaugaggccguuaggccgaanuugcagu

SEQ ID NO: 12087 - RNA, 38 nt, Artificial Sequence
  Description of Artificial Sequence:  Enzymatic Nucleic Acid
  misc_feature (31)..(31): n stands for inosine
cauggccacugaugaggccguuaggccgaanaguugca

SEQ ID NO: 12088 - RNA, 38 nt, Artificial Sequence
  Description of Artificial Sequence:  Enzymatic Nucleic Acid
  misc_feature (31)..(31): n stands for inosine
ccauggcccugaugaggccguuaggccgaangaguugc

SEQ ID NO: 12089 - RNA, 38 nt, Artificial Sequence
  Description of Artificial Sequence:  Enzymatic Nucleic Acid
  misc_feature (31)..(31): n stands for inosine
agugccaucugaugaggccguuaggccgaanccaggag

SEQ ID NO: 12090 - RNA, 38 nt, Artificial Sequence
  Description of Artificial Sequence:  Enzymatic Nucleic Acid
  misc_feature (31)..(31): n stands for inosine
cagugccacugaugaggccguuaggccgaangccagga

SEQ ID NO: 12091 - RNA, 38 nt, Artificial Sequence
  Description of Artificial Sequence:  Enzymatic Nucleic Acid
  misc_feature (31)..(31): n stands for inosine
cacuccagcugaugaggccguuaggccgaanccauggc

SEQ ID NO: 12092 - RNA, 38 nt, Artificial Sequence
  Description of Artificial Sequence:  Enzymatic Nucleic Acid
  misc_feature (31)..(31): n stands for inosine
agcacucccugaugaggccguuaggccgaanugccaug

SEQ ID NO: 12093 - RNA, 38 nt, Artificial Sequence
  Description of Artificial Sequence:  Enzymatic Nucleic Acid
  misc_feature (31)..(31): n stands for inosine
ggagagcccugaugaggccguuaggccgaancacucca

SEQ ID NO: 12094 - RNA, 38 nt, Artificial Sequence
  Description of Artificial Sequence:  Enzymatic Nucleic Acid
  misc_feature (31)..(31): n stands for inosine
cuagggagcugaugaggccguuaggccgaanccagcac

SEQ ID NO: 12095 - RNA, 38 nt, Artificial Sequence
  Description of Artificial Sequence:  Enzymatic Nucleic Acid
  misc_feature (31)..(31): n stands for inosine
cccuagggcugaugaggccguuaggccgaanagccagc

SEQ ID NO: 12096 - RNA, 38 nt, Artificial Sequence
  Description of Artificial Sequence:  Enzymatic Nucleic Acid
  misc_feature (31)..(31): n stands for inosine
ugcccuagcugaugaggccguuaggccgaanagagcca

SEQ ID NO: 12097 - RNA, 38 nt, Artificial Sequence
  Description of Artificial Sequence:  Enzymatic Nucleic Acid
  misc_feature (31)..(31): n stands for inosine
gugcccuacugaugaggccguuaggccgaangagagcc

SEQ ID NO: 12098 - RNA, 38 nt, Artificial Sequence
  Description of Artificial Sequence:  Enzymatic Nucleic Acid
  misc_feature (31)..(31): n stands for inosine
ggugcccucugaugaggccguuaggccgaanggagagc

SEQ ID NO: 12099 - RNA, 38 nt, Artificial Sequence
  Description of Artificial Sequence:  Enzymatic Nucleic Acid
  misc_feature (31)..(31): n stands for inosine
agaaagggcugaugaggccguuaggccgaancccuagg

SEQ ID NO: 12100 - RNA, 38 nt, Artificial Sequence
  Description of Artificial Sequence:  Enzymatic Nucleic Acid
  misc_feature (31)..(31): n stands for inosine
gaagaaagcugaugaggccguuaggccgaanugcccua

SEQ ID NO: 12101 - RNA, 38 nt, Artificial Sequence
  Description of Artificial Sequence:  Enzymatic Nucleic Acid
  misc_feature (31)..(31): n stands for inosine
agaagaaacugaugaggccguuaggccgaangugcccu

SEQ ID NO: 12102 - RNA, 38 nt, Artificial Sequence
  Description of Artificial Sequence:  Enzymatic Nucleic Acid
  misc_feature (31)..(31): n stands for inosine
uagaagaacugaugaggccguuaggccgaanggugccc

SEQ ID NO: 12103 - RNA, 38 nt, Artificial Sequence
  Description of Artificial Sequence:  Enzymatic Nucleic Acid
  misc_feature (31)..(31): n stands for inosine
ucgguagacugaugaggccguuaggccgaanaaagggu

SEQ ID NO: 12104 - RNA, 38 nt, Artificial Sequence
  Description of Artificial Sequence:  Enzymatic Nucleic Acid
  misc_feature (31)..(31): n stands for inosine
ccgucggucugaugaggccguuaggccgaanaagaaag

SEQ ID NO: 12105 - RNA, 38 nt, Artificial Sequence
  Description of Artificial Sequence:  Enzymatic Nucleic Acid
  misc_feature (31)..(31): n stands for inosine
gugccguccugaugaggccguuaggccgaanuagaaga

SEQ ID NO: 12106 - RNA, 38 nt, Artificial Sequence
  Description of Artificial Sequence:  Enzymatic Nucleic Acid
  misc_feature (31)..(31): n stands for inosine
gggugaugcugaugaggccguuaggccgaanccgucgg

SEQ ID NO: 12107 - RNA, 38 nt, Artificial Sequence
  Description of Artificial Sequence:  Enzymatic Nucleic Acid
  misc_feature (31)..(31): n stands for inosine
cagggugacugaugaggccguuaggccgaanugccguc

SEQ ID NO: 12108 - RNA, 38 nt, Artificial Sequence
  Description of Artificial Sequence:  Enzymatic Nucleic Acid
  misc_feature (31)..(31): n stands for inosine
gcgcagggcugaugaggccguuaggccgaanaugugcc

SEQ ID NO: 12109 - RNA, 38 nt, Artificial Sequence
  Description of Artificial Sequence:  Enzymatic Nucleic Acid
  misc_feature (31)..(31): n stands for inosine
aggcgcagcugaugaggccguuaggccgaanugaugug

SEQ ID NO: 12110 - RNA, 38 nt, Artificial Sequence
  Description of Artificial Sequence:  Enzymatic Nucleic Acid
  misc_feature (31)..(31): n stands for inosine
caggcgcacugaugaggccguuaggccgaangugaugu

SEQ ID NO: 12111 - RNA, 38 nt, Artificial Sequence
  Description of Artificial Sequence:  Enzymatic Nucleic Acid
  misc_feature (31)..(31): n stands for inosine
ccaggcgccugaugaggccguuaggccgaanggugaug

SEQ ID NO: 12112 - RNA, 38 nt, Artificial Sequence
  Description of Artificial Sequence:  Enzymatic Nucleic Acid
  misc_feature (31)..(31): n stands for inosine
ugcgcccacugaugaggccguuaggccgaancgcaggg

SEQ ID NO: 12113 - RNA, 38 nt, Artificial Sequence
  Description of Artificial Sequence:  Enzymatic Nucleic Acid
  misc_feature (31)..(31): n stands for inosine
gugcgccccugaugaggccguuaggccgaangcgcagg

SEQ ID NO: 12114 - RNA, 38 nt, Artificial Sequence
  Description of Artificial Sequence:  Enzymatic Nucleic Acid
  misc_feature (31)..(31): n stands for inosine
gccaccagcugaugaggccguuaggccgaancgcccag

SEQ ID NO: 12115 - RNA, 38 nt, Artificial Sequence
  Description of Artificial Sequence:  Enzymatic Nucleic Acid
  misc_feature (31)..(31): n stands for inosine
gggccacccugaugaggccguuaggccgaanugcgccc

SEQ ID NO: 12116 - RNA, 38 nt, Artificial Sequence
  Description of Artificial Sequence:  Enzymatic Nucleic Acid
  misc_feature (31)..(31): n stands for inosine
accaccggcugaugaggccguuaggccgaanccaccag

SEQ ID NO: 12117 - RNA, 38 nt, Artificial Sequence
  Description of Artificial Sequence:  Enzymatic Nucleic Acid
  misc_feature (31)..(31): n stands for inosine
caccaccgcugaugaggccguuaggccgaangccacca

SEQ ID NO: 12118 - RNA, 38 nt, Artificial Sequence
  Description of Artificial Sequence:  Enzymatic Nucleic Acid
  misc_feature (31)..(31): n stands for inosine
ucaccacccugaugaggccguuaggccgaanggccacc

SEQ ID NO: 12119 - RNA, 38 nt, Artificial Sequence
  Description of Artificial Sequence:  Enzymatic Nucleic Acid
  misc_feature (31)..(31): n stands for inosine
agggagaacugaugaggccguuaggccgaancgcucac

SEQ ID NO: 12120 - RNA, 38 nt, Artificial Sequence
  Description of Artificial Sequence:  Enzymatic Nucleic Acid
  misc_feature (31)..(31): n stands for inosine
cagggagacugaugaggccguuaggccgaangcgcuca

SEQ ID NO: 12121 - RNA, 38 nt, Artificial Sequence
  Description of Artificial Sequence:  Enzymatic Nucleic Acid
  misc_feature (31)..(31): n stands for inosine
agccagggcugaugaggccguuaggccgaanaaggcgc

SEQ ID NO: 12122 - RNA, 38 nt, Artificial Sequence
  Description of Artificial Sequence:  Enzymatic Nucleic Acid
  misc_feature (31)..(31): n stands for inosine
aaagccagcugaugaggccguuaggccgaanagaaggc

SEQ ID NO: 12123 - RNA, 38 nt, Artificial Sequence
  Description of Artificial Sequence:  Enzymatic Nucleic Acid
  misc_feature (31)..(31): n stands for inosine
gaaagccacugaugaggccguuaggccgaangagaagg

SEQ ID NO: 12124 - RNA, 38 nt, Artificial Sequence
  Description of Artificial Sequence:  Enzymatic Nucleic Acid
  misc_feature (31)..(31): n stands for inosine
agaaagcccugaugaggccguuaggccgaanggagaag

SEQ ID NO: 12125 - RNA, 38 nt, Artificial Sequence
  Description of Artificial Sequence:  Enzymatic Nucleic Acid
  misc_feature (31)..(31): n stands for inosine
gcgcagaacugaugaggccguuaggccgaanccaggga

SEQ ID NO: 12126 - RNA, 38 nt, Artificial Sequence
  Description of Artificial Sequence:  Enzymatic Nucleic Acid
  misc_feature (31)..(31): n stands for inosine
uagcgcgccugaugaggccguuaggccgaanaaagcca

SEQ ID NO: 12127 - RNA, 38 nt, Artificial Sequence
  Description of Artificial Sequence:  Enzymatic Nucleic Acid
  misc_feature (31)..(31): n stands for inosine
ugaaaggucugaugaggccguuaggccgaancgcgcag

SEQ ID NO: 12128 - RNA, 38 nt, Artificial Sequence
  Description of Artificial Sequence:  Enzymatic Nucleic Acid
  misc_feature (31)..(31): n stands for inosine
ccaugaaacugaugaggccguuaggccgaanuagcgcg

SEQ ID NO: 12129 - RNA, 38 nt, Artificial Sequence
  Description of Artificial Sequence:  Enzymatic Nucleic Acid
  misc_feature (31)..(31): n stands for inosine
cccaugaacugaugaggccguuaggccgaanguagcgc

SEQ ID NO: 12130 - RNA, 38 nt, Artificial Sequence
  Description of Artificial Sequence:  Enzymatic Nucleic Acid
  misc_feature (31)..(31): n stands for inosine
gaagcccacugaugaggccguuaggccgaanaaaggua

SEQ ID NO: 12131 - RNA, 38 nt, Artificial Sequence
  Description of Artificial Sequence:  Enzymatic Nucleic Acid
  misc_feature (31)..(31): n stands for inosine
cuucccgacugaugaggccguuaggccgaancccauga

SEQ ID NO: 12132 - RNA, 38 nt, Artificial Sequence
  Description of Artificial Sequence:  Enzymatic Nucleic Acid
  misc_feature (31)..(31): n stands for inosine
ggcaguaccugaugaggccguuaggccgaancacgaac

SEQ ID NO: 12133 - RNA, 38 nt, Artificial Sequence
  Description of Artificial Sequence:  Enzymatic Nucleic Acid
  misc_feature (31)..(31): n stands for inosine
gccggggccugaugaggccguuaggccgaanuacugca

SEQ ID NO: 12134 - RNA, 38 nt, Artificial Sequence
  Description of Artificial Sequence:  Enzymatic Nucleic Acid
  misc_feature (31)..(31): n stands for inosine
ggugccggcugaugaggccguuaggccgaancaguacu

SEQ ID NO: 12135 - RNA, 38 nt, Artificial Sequence
  Description of Artificial Sequence:  Enzymatic Nucleic Acid
  misc_feature (31)..(31): n stands for inosine
aggugccgcugaugaggccguuaggccgaangcaguac

SEQ ID NO: 12136 - RNA, 38 nt, Artificial Sequence
  Description of Artificial Sequence:  Enzymatic Nucleic Acid
  misc_feature (31)..(31): n stands for inosine
caggugcccugaugaggccguuaggccgaanggcagua

SEQ ID NO: 12137 - RNA, 38 nt, Artificial Sequence
  Description of Artificial Sequence:  Enzymatic Nucleic Acid
  misc_feature (31)..(31): n stands for inosine
gcaccaggcugaugaggccguuaggccgaanccggggc

SEQ ID NO: 12138 - RNA, 38 nt, Artificial Sequence
  Description of Artificial Sequence:  Enzymatic Nucleic Acid
  misc_feature (31)..(31): n stands for inosine
aagcaccacugaugaggccguuaggccgaanugccggg

SEQ ID NO: 12139 - RNA, 38 nt, Artificial Sequence
  Description of Artificial Sequence:  Enzymatic Nucleic Acid
  misc_feature (31)..(31): n stands for inosine
aaagcacccugaugaggccguuaggccgaangugccgg

SEQ ID NO: 12140 - RNA, 38 nt, Artificial Sequence
  Description of Artificial Sequence:  Enzymatic Nucleic Acid
  misc_feature (31)..(31): n stands for inosine
cuggauaacugaugaggccguuaggccgaancaccagg

SEQ ID NO: 12141 - RNA, 38 nt, Artificial Sequence
  Description of Artificial Sequence:  Enzymatic Nucleic Acid
  misc_feature (31)..(31): n stands for inosine
gaccaucucugaugaggccguuaggccgaanauaaagc

SEQ ID NO: 12142 - RNA, 38 nt, Artificial Sequence
  Description of Artificial Sequence:  Enzymatic Nucleic Acid
  misc_feature (31)..(31): n stands for inosine
ggaccauccugaugaggccguuaggccgaangauaaag

SEQ ID NO: 12143 - RNA, 38 nt, Artificial Sequence
  Description of Artificial Sequence:  Enzymatic Nucleic Acid
  misc_feature (31)..(31): n stands for inosine
cuccucgucugaugaggccguuaggccgaanaccaucu

SEQ ID NO: 12144 - RNA, 38 nt, Artificial Sequence
  Description of Artificial Sequence:  Enzymatic Nucleic Acid
  misc_feature (31)..(31): n stands for inosine
ccuccucgcugaugaggccguuaggccgaangaccauc

SEQ ID NO: 12145 - RNA, 38 nt, Artificial Sequence
  Description of Artificial Sequence:  Enzymatic Nucleic Acid
  misc_feature (31)..(31): n stands for inosine
cgacagcgcugaugaggccguuaggccgaancccuccu

SEQ ID NO: 12146 - RNA, 38 nt, Artificial Sequence
  Description of Artificial Sequence:  Enzymatic Nucleic Acid
  misc_feature (31)..(31): n stands for inosine
gcaccgaccugaugaggccguuaggccgaancgagccc

SEQ ID NO: 12147 - RNA, 38 nt, Artificial Sequence
  Description of Artificial Sequence:  Enzymatic Nucleic Acid
  misc_feature (31)..(31): n stands for inosine
aguacccccugaugaggccguuaggccgaancaccgac

SEQ ID NO: 12148 - RNA, 38 nt, Artificial Sequence
  Description of Artificial Sequence:  Enzymatic Nucleic Acid
  misc_feature (31)..(31): n stands for inosine
gagcacagcugaugaggccguuaggccgaanuacccca

SEQ ID NO: 12149 - RNA, 38 nt, Artificial Sequence
  Description of Artificial Sequence:  Enzymatic Nucleic Acid
  misc_feature (31)..(31): n stands for inosine
uagagcaccugaugaggccguuaggccgaanaguaccc

SEQ ID NO: 12150 - RNA, 38 nt, Artificial Sequence
  Description of Artificial Sequence:  Enzymatic Nucleic Acid
  misc_feature (31)..(31): n stands for inosine
uggaguagcugaugaggccguuaggccgaancacagag

SEQ ID NO: 12151 - RNA, 38 nt, Artificial Sequence
  Description of Artificial Sequence:  Enzymatic Nucleic Acid
  misc_feature (31)..(31): n stands for inosine
gcuggagucugaugaggccguuaggccgaanagcacag

SEQ ID NO: 12152 - RNA, 38 nt, Artificial Sequence
  Description of Artificial Sequence:  Enzymatic Nucleic Acid
  misc_feature (31)..(31): n stands for inosine
gaggcuggcugaugaggccguuaggccgaanuagagca

SEQ ID NO: 12153 - RNA, 38 nt, Artificial Sequence
  Description of Artificial Sequence:  Enzymatic Nucleic Acid
  misc_feature (31)..(31): n stands for inosine
augaggcucugaugaggccguuaggccgaanaguagag

SEQ ID NO: 12154 - RNA, 38 nt, Artificial Sequence
  Description of Artificial Sequence:  Enzymatic Nucleic Acid
  misc_feature (31)..(31): n stands for inosine
caugaggccugaugaggccguuaggccgaangaguaga

SEQ ID NO: 12155 - RNA, 38 nt, Artificial Sequence
  Description of Artificial Sequence:  Enzymatic Nucleic Acid
  misc_feature (31)..(31): n stands for inosine
cgccaugacugaugaggccguuaggccgaancuggagu

SEQ ID NO: 12156 - RNA, 38 nt, Artificial Sequence
  Description of Artificial Sequence:  Enzymatic Nucleic Acid
  misc_feature (31)..(31): n stands for inosine
gcgccaugcugaugaggccguuaggccgaangcuggag

SEQ ID NO: 12157 - RNA, 38 nt, Artificial Sequence
  Description of Artificial Sequence:  Enzymatic Nucleic Acid
  misc_feature (31)..(31): n stands for inosine
cagcgccacugaugaggccguuaggccgaanaggcugg

SEQ ID NO: 12158 - RNA, 38 nt, Artificial Sequence
  Description of Artificial Sequence:  Enzymatic Nucleic Acid
  misc_feature (31)..(31): n stands for inosine
ggaccagccugaugaggccguuaggccgaancgccaug

SEQ ID NO: 12159 - RNA, 38 nt, Artificial Sequence
  Description of Artificial Sequence:  Enzymatic Nucleic Acid
  misc_feature (31)..(31): n stands for inosine
cgaggacccugaugaggccguuaggccgaancagcgcc

SEQ ID NO: 12160 - RNA, 38 nt, Artificial Sequence
  Description of Artificial Sequence:  Enzymatic Nucleic Acid
  misc_feature (31)..(31): n stands for inosine
gguggcgacugaugaggccguuaggccgaanaccagca

SEQ ID NO: 12161 - RNA, 38 nt, Artificial Sequence
  Description of Artificial Sequence:  Enzymatic Nucleic Acid
  misc_feature (31)..(31): n stands for inosine
cgguggcgcugaugaggccguuaggccgaangaccagc

SEQ ID NO: 12162 - RNA, 38 nt, Artificial Sequence
  Description of Artificial Sequence:  Enzymatic Nucleic Acid
  misc_feature (31)..(31): n stands for inosine
agcacggucugaugaggccguuaggccgaancgaggac

SEQ ID NO: 12163 - RNA, 38 nt, Artificial Sequence
  Description of Artificial Sequence:  Enzymatic Nucleic Acid
  misc_feature (31)..(31): n stands for inosine
cagcacggcugaugaggccguuaggccgaangcgagga

SEQ ID NO: 12164 - RNA, 38 nt, Artificial Sequence
  Description of Artificial Sequence:  Enzymatic Nucleic Acid
  misc_feature (31)..(31): n stands for inosine
cacagcaccugaugaggccguuaggccgaanuggcgag

SEQ ID NO: 12165 - RNA, 38 nt, Artificial Sequence
  Description of Artificial Sequence:  Enzymatic Nucleic Acid
  misc_feature (31)..(31): n stands for inosine
gguugcaccugaugaggccguuaggccgaancacggug

SEQ ID NO: 12166 - RNA, 38 nt, Artificial Sequence
  Description of Artificial Sequence:  Enzymatic Nucleic Acid
  misc_feature (31)..(31): n stands for inosine
gccgaggucugaugaggccguuaggccgaancacagca

SEQ ID NO: 12167 - RNA, 38 nt, Artificial Sequence
  Description of Artificial Sequence:  Enzymatic Nucleic Acid
  misc_feature (31)..(31): n stands for inosine
ggcgccgacugaugaggccguuaggccgaanuugcaca

SEQ ID NO: 12168 - RNA, 38 nt, Artificial Sequence
  Description of Artificial Sequence:  Enzymatic Nucleic Acid
  misc_feature (31)..(31): n stands for inosine
uggcgccgcugaugaggccguuaggccgaanguugcac

SEQ ID NO: 12169 - RNA, 38 nt, Artificial Sequence
  Description of Artificial Sequence:  Enzymatic Nucleic Acid
  misc_feature (31)..(31): n stands for inosine
uugcgcaucugaugaggccguuaggccgaancgccgag

SEQ ID NO: 12170 - RNA, 38 nt, Artificial Sequence
  Description of Artificial Sequence:  Enzymatic Nucleic Acid
  misc_feature (31)..(31): n stands for inosine
guugcgcacugaugaggccguuaggccgaangcgccga

SEQ ID NO: 12171 - RNA, 38 nt, Artificial Sequence
  Description of Artificial Sequence:  Enzymatic Nucleic Acid
  misc_feature (31)..(31): n stands for inosine
auagaggucugaugaggccguuaggccgaancgcaugg

SEQ ID NO: 12172 - RNA, 38 nt, Artificial Sequence
  Description of Artificial Sequence:  Enzymatic Nucleic Acid
  misc_feature (31)..(31): n stands for inosine
cgcauagacugaugaggccguuaggccgaanuugcgca

SEQ ID NO: 12173 - RNA, 38 nt, Artificial Sequence
  Description of Artificial Sequence:  Enzymatic Nucleic Acid
  misc_feature (31)..(31): n stands for inosine
ucgcauagcugaugaggccguuaggccgaanguugcgc

SEQ ID NO: 12174 - RNA, 38 nt, Artificial Sequence
  Description of Artificial Sequence:  Enzymatic Nucleic Acid
  misc_feature (31)..(31): n stands for inosine
caucgcaucugaugaggccguuaggccgaanagguugc

SEQ ID NO: 12175 - RNA, 38 nt, Artificial Sequence
  Description of Artificial Sequence:  Enzymatic Nucleic Acid
  misc_feature (31)..(31): n stands for inosine
gccgccggcugaugaggccguuaggccgaancaucgca

SEQ ID NO: 12176 - RNA, 38 nt, Artificial Sequence
  Description of Artificial Sequence:  Enzymatic Nucleic Acid
  misc_feature (31)..(31): n stands for inosine
cagccgcccugaugaggccguuaggccgaanugcaucg

SEQ ID NO: 12177 - RNA, 38 nt, Artificial Sequence
  Description of Artificial Sequence:  Enzymatic Nucleic Acid
  misc_feature (31)..(31): n stands for inosine
gccgcugccugaugaggccguuaggccgaanccgccgg

SEQ ID NO: 12178 - RNA, 38 nt, Artificial Sequence
  Description of Artificial Sequence:  Enzymatic Nucleic Acid
  misc_feature (31)..(31): n stands for inosine
ggugccgccugaugaggccguuaggccgaancagccgc

SEQ ID NO: 12179 - RNA, 38 nt, Artificial Sequence
  Description of Artificial Sequence:  Enzymatic Nucleic Acid
  misc_feature (31)..(31): n stands for inosine
agcgcgggcugaugaggccguuaggccgaanccgcugc

SEQ ID NO: 12180 - RNA, 38 nt, Artificial Sequence
  Description of Artificial Sequence:  Enzymatic Nucleic Acid
  misc_feature (31)..(31): n stands for inosine
ggagcgcgcugaugaggccguuaggccgaanugccgcu

SEQ ID NO: 12181 - RNA, 38 nt, Artificial Sequence
  Description of Artificial Sequence:  Enzymatic Nucleic Acid
  misc_feature (31)..(31): n stands for inosine
aggagcgccugaugaggccguuaggccgaangugccgc

SEQ ID NO: 12182 - RNA, 38 nt, Artificial Sequence
  Description of Artificial Sequence:  Enzymatic Nucleic Acid
  misc_feature (31)..(31): n stands for inosine
ggugcaggcugaugaggccguuaggccgaancgcgggu

SEQ ID NO: 12183 - RNA, 38 nt, Artificial Sequence
  Description of Artificial Sequence:  Enzymatic Nucleic Acid
  misc_feature (31)..(31): n stands for inosine
cuggugcacugaugaggccguuaggccgaanagcgcgg

SEQ ID NO: 12184 - RNA, 38 nt, Artificial Sequence
  Description of Artificial Sequence:  Enzymatic Nucleic Acid
  misc_feature (31)..(31): n stands for inosine
ccuggugccugaugaggccguuaggccgaangagcgcg

SEQ ID NO: 12185 - RNA, 38 nt, Artificial Sequence
  Description of Artificial Sequence:  Enzymatic Nucleic Acid
  misc_feature (31)..(31): n stands for inosine
gucccuggcugaugaggccguuaggccgaancaggagc

SEQ ID NO: 12186 - RNA, 38 nt, Artificial Sequence
  Description of Artificial Sequence:  Enzymatic Nucleic Acid
  misc_feature (31)..(31): n stands for inosine
cagucccucugaugaggccguuaggccgaanugcagga

SEQ ID NO: 12187 - RNA, 38 nt, Artificial Sequence
  Description of Artificial Sequence:  Enzymatic Nucleic Acid
  misc_feature (31)..(31): n stands for inosine
acaguccccugaugaggccguuaggccgaangugcagg

SEQ ID NO: 12188 - RNA, 38 nt, Artificial Sequence
  Description of Artificial Sequence:  Enzymatic Nucleic Acid
  misc_feature (31)..(31): n stands for inosine
cucggcaccugaugaggccguuaggccgaanucccugg

SEQ ID NO: 12189 - RNA, 38 nt, Artificial Sequence
  Description of Artificial Sequence:  Enzymatic Nucleic Acid
  misc_feature (31)..(31): n stands for inosine
cgcggcuccugaugaggccguuaggccgaancacaguc

SEQ ID NO: 12190 - RNA, 38 nt, Artificial Sequence
  Description of Artificial Sequence:  Enzymatic Nucleic Acid
  misc_feature (31)..(31): n stands for inosine
ccgcgcgccugaugaggccguuaggccgaancucggca

SEQ ID NO: 12191 - RNA, 38 nt, Artificial Sequence
  Description of Artificial Sequence:  Enzymatic Nucleic Acid
  misc_feature (31)..(31): n stands for inosine
ggcugaggcugaugaggccguuaggccgaanacgcuuc

SEQ ID NO: 12192 - RNA, 38 nt, Artificial Sequence
  Description of Artificial Sequence:  Enzymatic Nucleic Acid
  misc_feature (31)..(31): n stands for inosine
gggcugagcugaugaggccguuaggccgaangacgcuu

SEQ ID NO: 12193 - RNA, 38 nt, Artificial Sequence
  Description of Artificial Sequence:  Enzymatic Nucleic Acid
  misc_feature (31)..(31): n stands for inosine
ggggcugacugaugaggccguuaggccgaanggacgcu

SEQ ID NO: 12194 - RNA, 38 nt, Artificial Sequence
  Description of Artificial Sequence:  Enzymatic Nucleic Acid
  misc_feature (31)..(31): n stands for inosine
aggggcugcugaugaggccguuaggccgaangggacgc

SEQ ID NO: 12195 - RNA, 38 nt, Artificial Sequence
  Description of Artificial Sequence:  Enzymatic Nucleic Acid
  misc_feature (31)..(31): n stands for inosine
ccaggggccugaugaggccguuaggccgaanaggggac

SEQ ID NO: 12196 - RNA, 38 nt, Artificial Sequence
  Description of Artificial Sequence:  Enzymatic Nucleic Acid
  misc_feature (31)..(31): n stands for inosine
ccuccaggcugaugaggccguuaggccgaancugaggg

SEQ ID NO: 12197 - RNA, 38 nt, Artificial Sequence
  Description of Artificial Sequence:  Enzymatic Nucleic Acid
  misc_feature (31)..(31): n stands for inosine
uccuccagcugaugaggccguuaggccgaangcugagg

SEQ ID NO: 12198 - RNA, 38 nt, Artificial Sequence
  Description of Artificial Sequence:  Enzymatic Nucleic Acid
  misc_feature (31)..(31): n stands for inosine
cuccuccacugaugaggccguuaggccgaanggcugag

SEQ ID NO: 12199 - RNA, 38 nt, Artificial Sequence
  Description of Artificial Sequence:  Enzymatic Nucleic Acid
  misc_feature (31)..(31): n stands for inosine
gcuccucccugaugaggccguuaggccgaangggcuga

SEQ ID NO: 12200 - RNA, 38 nt, Artificial Sequence
  Description of Artificial Sequence:  Enzymatic Nucleic Acid
  misc_feature (31)..(31): n stands for inosine
ggugaucccugaugaggccguuaggccgaancuccucc

SEQ ID NO: 12201 - RNA, 38 nt, Artificial Sequence
  Description of Artificial Sequence:  Enzymatic Nucleic Acid
  misc_feature (31)..(31): n stands for inosine
gcaggaggcugaugaggccguuaggccgaanauccagc

SEQ ID NO: 12202 - RNA, 38 nt, Artificial Sequence
  Description of Artificial Sequence:  Enzymatic Nucleic Acid
  misc_feature (31)..(31): n stands for inosine
cagcaggacugaugaggccguuaggccgaanugaucca

SEQ ID NO: 12203 - RNA, 38 nt, Artificial Sequence
  Description of Artificial Sequence:  Enzymatic Nucleic Acid
  misc_feature (31)..(31): n stands for inosine
gcagcaggcugaugaggccguuaggccgaangugaucc

SEQ ID NO: 12204 - RNA, 38 nt, Artificial Sequence
  Description of Artificial Sequence:  Enzymatic Nucleic Acid
  misc_feature (31)..(31): n stands for inosine
cagcagcacugaugaggccguuaggccgaanaggugau

SEQ ID NO: 12205 - RNA, 38 nt, Artificial Sequence
  Description of Artificial Sequence:  Enzymatic Nucleic Acid
  misc_feature (31)..(31): n stands for inosine
ccagcagccugaugaggccguuaggccgaangagguga

SEQ ID NO: 12206 - RNA, 38 nt, Artificial Sequence
  Description of Artificial Sequence:  Enzymatic Nucleic Acid
  misc_feature (31)..(31): n stands for inosine
gcgccagccugaugaggccguuaggccgaancaggagg

SEQ ID NO: 12207 - RNA, 38 nt, Artificial Sequence
  Description of Artificial Sequence:  Enzymatic Nucleic Acid
  misc_feature (31)..(31): n stands for inosine
ucagcgcccugaugaggccguuaggccgaancagcagg

SEQ ID NO: 12208 - RNA, 38 nt, Artificial Sequence
  Description of Artificial Sequence:  Enzymatic Nucleic Acid
  misc_feature (31)..(31): n stands for inosine
cggucauccugaugaggccguuaggccgaancgccagc

SEQ ID NO: 12209 - RNA, 38 nt, Artificial Sequence
  Description of Artificial Sequence:  Enzymatic Nucleic Acid
  misc_feature (31)..(31): n stands for inosine
aagagcaccugaugaggccguuaggccgaanucaucag

SEQ ID NO: 12210 - RNA, 38 nt, Artificial Sequence
  Description of Artificial Sequence:  Enzymatic Nucleic Acid
  misc_feature (31)..(31): n stands for inosine
uagugaagcugaugaggccguuaggccgaancacgguc

SEQ ID NO: 12211 - RNA, 38 nt, Artificial Sequence
  Description of Artificial Sequence:  Enzymatic Nucleic Acid
  misc_feature (31)..(31): n stands for inosine
cauagugacugaugaggccguuaggccgaanagcacgg

SEQ ID NO: 12212 - RNA, 38 nt, Artificial Sequence
  Description of Artificial Sequence:  Enzymatic Nucleic Acid
  misc_feature (31)..(31): n stands for inosine
acacauagcugaugaggccguuaggccgaanaagagca

SEQ ID NO: 12213 - RNA, 38 nt, Artificial Sequence
  Description of Artificial Sequence:  Enzymatic Nucleic Acid
  misc_feature (31)..(31): n stands for inosine
gaacacaucugaugaggccguuaggccgaanugaagag

SEQ ID NO: 12214 - RNA, 38 nt, Artificial Sequence
  Description of Artificial Sequence:  Enzymatic Nucleic Acid
  misc_feature (31)..(31): n stands for inosine
acgggcagcugaugaggccguuaggccgaanaacacau

SEQ ID NO: 12215 - RNA, 38 nt, Artificial Sequence
  Description of Artificial Sequence:  Enzymatic Nucleic Acid
  misc_feature (31)..(31): n stands for inosine
uuacgggccugaugaggccguuaggccgaanagaacac

SEQ ID NO: 12216 - RNA, 38 nt, Artificial Sequence
  Description of Artificial Sequence:  Enzymatic Nucleic Acid
  misc_feature (31)..(31): n stands for inosine
aaauuacgcugaugaggccguuaggccgaancagagaa

SEQ ID NO: 12217 - RNA, 38 nt, Artificial Sequence
  Description of Artificial Sequence:  Enzymatic Nucleic Acid
  misc_feature (31)..(31): n stands for inosine
uaaauuaccugaugaggccguuaggccgaangcagaga

SEQ ID NO: 12218 - RNA, 38 nt, Artificial Sequence
  Description of Artificial Sequence:  Enzymatic Nucleic Acid
  misc_feature (31)..(31): n stands for inosine
ccauaguacugaugaggccguuaggccgaancgcgaua

SEQ ID NO: 12219 - RNA, 38 nt, Artificial Sequence
  Description of Artificial Sequence:  Enzymatic Nucleic Acid
  misc_feature (31)..(31): n stands for inosine
ugcuccaucugaugaggccguuaggccgaanuaagcgc

SEQ ID NO: 12220 - RNA, 38 nt, Artificial Sequence
  Description of Artificial Sequence:  Enzymatic Nucleic Acid
  misc_feature (31)..(31): n stands for inosine
uccuuaaacugaugaggccguuaggccgaancuccaua

SEQ ID NO: 12221 - RNA, 38 nt, Artificial Sequence
  Description of Artificial Sequence:  Enzymatic Nucleic Acid
  misc_feature (31)..(31): n stands for inosine
uuucuccucugaugaggccguuaggccgaanacauccu

SEQ ID NO: 12222 - RNA, 38 nt, Artificial Sequence
  Description of Artificial Sequence:  Enzymatic Nucleic Acid
  misc_feature (31)..(31): n stands for inosine
agaggucccugaugaggccguuaggccgaanuuuuucu

SEQ ID NO: 12223 - RNA, 38 nt, Artificial Sequence
  Description of Artificial Sequence:  Enzymatic Nucleic Acid
  misc_feature (31)..(31): n stands for inosine
ucuucagacugaugaggccguuaggccgaanuccuguu

SEQ ID NO: 12224 - RNA, 38 nt, Artificial Sequence
  Description of Artificial Sequence:  Enzymatic Nucleic Acid
  misc_feature (31)..(31): n stands for inosine
uucuucagcugaugaggccguuaggccgaanguccugu

SEQ ID NO: 12225 - RNA, 38 nt, Artificial Sequence
  Description of Artificial Sequence:  Enzymatic Nucleic Acid
  misc_feature (31)..(31): n stands for inosine
gcuucuuccugaugaggccguuaggccgaanagguccu

SEQ ID NO: 12226 - RNA, 38 nt, Artificial Sequence
  Description of Artificial Sequence:  Enzymatic Nucleic Acid
  misc_feature (31)..(31): n stands for inosine
aggucuuccugaugaggccguuaggccgaancuucuuc

SEQ ID NO: 12227 - RNA, 38 nt, Artificial Sequence
  Description of Artificial Sequence:  Enzymatic Nucleic Acid
  misc_feature (31)..(31): n stands for inosine
ggcucggacugaugaggccguuaggccgaanucuucug

SEQ ID NO: 12228 - RNA, 38 nt, Artificial Sequence
  Description of Artificial Sequence:  Enzymatic Nucleic Acid
  misc_feature (31)..(31): n stands for inosine
aggcucggcugaugaggccguuaggccgaangucuucu

SEQ ID NO: 12229 - RNA, 38 nt, Artificial Sequence
  Description of Artificial Sequence:  Enzymatic Nucleic Acid
  misc_feature (31)..(31): n stands for inosine
caaggcuccugaugaggccguuaggccgaanaggucuu

SEQ ID NO: 12230 - RNA, 38 nt, Artificial Sequence
  Description of Artificial Sequence:  Enzymatic Nucleic Acid
  misc_feature (31)..(31): n stands for inosine
aaucgcaacugaugaggccguuaggccgaancucggag

SEQ ID NO: 12231 - RNA, 38 nt, Artificial Sequence
  Description of Artificial Sequence:  Enzymatic Nucleic Acid
  misc_feature (31)..(31): n stands for inosine
aaaucgcacugaugaggccguuaggccgaangcucgga

SEQ ID NO: 12232 - RNA, 38 nt, Artificial Sequence
  Description of Artificial Sequence:  Enzymatic Nucleic Acid
  misc_feature (31)..(31): n stands for inosine
ucacagaucugaugaggccguuaggccgaanaaaucgc

SEQ ID NO: 12233 - RNA, 38 nt, Artificial Sequence
  Description of Artificial Sequence:  Enzymatic Nucleic Acid
  misc_feature (31)..(31): n stands for inosine
gaaaucaccugaugaggccguuaggccgaanauagaaa

SEQ ID NO: 12234 - RNA, 38 nt, Artificial Sequence
  Description of Artificial Sequence:  Enzymatic Nucleic Acid
  misc_feature (31)..(31): n stands for inosine
uccacaaucugaugaggccguuaggccgaanaaaucac

SEQ ID NO: 12235 - RNA, 38 nt, Artificial Sequence
  Description of Artificial Sequence:  Enzymatic Nucleic Acid
  misc_feature (31)..(31): n stands for inosine
aauccaagcugaugaggccguuaggccgaanuccacaa

SEQ ID NO: 12236 - RNA, 38 nt, Artificial Sequence
  Description of Artificial Sequence:  Enzymatic Nucleic Acid
  misc_feature (31)..(31): n stands for inosine
aaauccaacugaugaggccguuaggccgaanguccaca

SEQ ID NO: 12237 - RNA, 38 nt, Artificial Sequence
  Description of Artificial Sequence:  Enzymatic Nucleic Acid
  misc_feature (31)..(31): n stands for inosine
aaaauccacugaugaggccguuaggccgaangguccac

SEQ ID NO: 12238 - RNA, 38 nt, Artificial Sequence
  Description of Artificial Sequence:  Enzymatic Nucleic Acid
  misc_feature (31)..(31): n stands for inosine
ucugaaaacugaugaggccguuaggccgaanauaaaaa

SEQ ID NO: 12239 - RNA, 38 nt, Artificial Sequence
  Description of Artificial Sequence:  Enzymatic Nucleic Acid
  misc_feature (31)..(31): n stands for inosine
uggagauccugaugaggccguuaggccgaanaaaauga

SEQ ID NO: 12240 - RNA, 38 nt, Artificial Sequence
  Description of Artificial Sequence:  Enzymatic Nucleic Acid
  misc_feature (31)..(31): n stands for inosine
aauacuggcugaugaggccguuaggccgaanaucugaa

SEQ ID NO: 12241 - RNA, 38 nt, Artificial Sequence
  Description of Artificial Sequence:  Enzymatic Nucleic Acid
  misc_feature (31)..(31): n stands for inosine
gaaauacucugaugaggccguuaggccgaanagaucug

SEQ ID NO: 12242 - RNA, 38 nt, Artificial Sequence
  Description of Artificial Sequence:  Enzymatic Nucleic Acid
  misc_feature (31)..(31): n stands for inosine
cgaaauaccugaugaggccguuaggccgaangagaucu

SEQ ID NO: 12243 - RNA, 38 nt, Artificial Sequence
  Description of Artificial Sequence:  Enzymatic Nucleic Acid
  misc_feature (31)..(31): n stands for inosine
aaaucuugcugaugaggccguuaggccgaanaaaaaau

SEQ ID NO: 12244 - RNA, 38 nt, Artificial Sequence
  Description of Artificial Sequence:  Enzymatic Nucleic Acid
  misc_feature (31)..(31): n stands for inosine
gaaaaucucugaugaggccguuaggccgaanugaaaaa

SEQ ID NO: 12245 - RNA, 38 nt, Artificial Sequence
  Description of Artificial Sequence:  Enzymatic Nucleic Acid
  misc_feature (31)..(31): n stands for inosine
aggucuaacugaugaggccguuaggccgaanaaaaucu

SEQ ID NO: 12246 - RNA, 38 nt, Artificial Sequence
  Description of Artificial Sequence:  Enzymatic Nucleic Acid
  misc_feature (31)..(31): n stands for inosine
accuaagacugaugaggccguuaggccgaanucuaaug

SEQ ID NO: 12247 - RNA, 38 nt, Artificial Sequence
  Description of Artificial Sequence:  Enzymatic Nucleic Acid
  misc_feature (31)..(31): n stands for inosine
uaccuaagcugaugaggccguuaggccgaangucuaau

SEQ ID NO: 12248 - RNA, 38 nt, Artificial Sequence
  Description of Artificial Sequence:  Enzymatic Nucleic Acid
  misc_feature (31)..(31): n stands for inosine
uguaccuacugaugaggccguuaggccgaanaggucua

SEQ ID NO: 12249 - RNA, 38 nt, Artificial Sequence
  Description of Artificial Sequence:  Enzymatic Nucleic Acid
  misc_feature (31)..(31): n stands for inosine
ccggcucccugaugaggccguuaggccgaanuaccuaa

SEQ ID NO: 12250 - RNA, 38 nt, Artificial Sequence
  Description of Artificial Sequence:  Enzymatic Nucleic Acid
  misc_feature (31)..(31): n stands for inosine
gcugcacccugaugaggccguuaggccgaancuccugu

SEQ ID NO: 12251 - RNA, 38 nt, Artificial Sequence
  Description of Artificial Sequence:  Enzymatic Nucleic Acid
  misc_feature (31)..(31): n stands for inosine
ggaauugccugaugaggccguuaggccgaancaccggc

SEQ ID NO: 12252 - RNA, 38 nt, Artificial Sequence
  Description of Artificial Sequence:  Enzymatic Nucleic Acid
  misc_feature (31)..(31): n stands for inosine
aguggaaucugaugaggccguuaggccgaancugcacc

SEQ ID NO: 12253 - RNA, 38 nt, Artificial Sequence
  Description of Artificial Sequence:  Enzymatic Nucleic Acid
  misc_feature (31)..(31): n stands for inosine
auguuagucugaugaggccguuaggccgaanaauugcu

SEQ ID NO: 12254 - RNA, 38 nt, Artificial Sequence
  Description of Artificial Sequence:  Enzymatic Nucleic Acid
  misc_feature (31)..(31): n stands for inosine
cauguuagcugaugaggccguuaggccgaangaauugc

SEQ ID NO: 12255 - RNA, 38 nt, Artificial Sequence
  Description of Artificial Sequence:  Enzymatic Nucleic Acid
  misc_feature (31)..(31): n stands for inosine
uccauguucugaugaggccguuaggccgaanuggaauu

SEQ ID NO: 12256 - RNA, 38 nt, Artificial Sequence
  Description of Artificial Sequence:  Enzymatic Nucleic Acid
  misc_feature (31)..(31): n stands for inosine
ggauuccacugaugaggccguuaggccgaanuuagugg

SEQ ID NO: 12257 - RNA, 38 nt, Artificial Sequence
  Description of Artificial Sequence:  Enzymatic Nucleic Acid
  misc_feature (31)..(31): n stands for inosine
cacagacucugaugaggccguuaggccgaanauuccau

SEQ ID NO: 12258 - RNA, 38 nt, Artificial Sequence
  Description of Artificial Sequence:  Enzymatic Nucleic Acid
  misc_feature (31)..(31): n stands for inosine
ucacagaccugaugaggccguuaggccgaangauucca

SEQ ID NO: 12259 - RNA, 38 nt, Artificial Sequence
  Description of Artificial Sequence:  Enzymatic Nucleic Acid
  misc_feature (31)..(31): n stands for inosine
acugucaccugaugaggccguuaggccgaanacuggau

SEQ ID NO: 12260 - RNA, 38 nt, Artificial Sequence
  Description of Artificial Sequence:  Enzymatic Nucleic Acid
  misc_feature (31)..(31): n stands for inosine
aaaaacaccugaugaggccguuaggccgaanucacaga

SEQ ID NO: 12261 - RNA, 38 nt, Artificial Sequence
  Description of Artificial Sequence:  Enzymatic Nucleic Acid
  misc_feature (31)..(31): n stands for inosine
ccacagagcugaugaggccguuaggccgaanaaaaaca

SEQ ID NO: 12262 - RNA, 38 nt, Artificial Sequence
  Description of Artificial Sequence:  Enzymatic Nucleic Acid
  misc_feature (31)..(31): n stands for inosine
uaccacagcugaugaggccguuaggccgaanugaaaaa

SEQ ID NO: 12263 - RNA, 38 nt, Artificial Sequence
  Description of Artificial Sequence:  Enzymatic Nucleic Acid
  misc_feature (31)..(31): n stands for inosine
cuuaccaccugaugaggccguuaggccgaanagugaaa

SEQ ID NO: 12264 - RNA, 38 nt, Artificial Sequence
  Description of Artificial Sequence:  Enzymatic Nucleic Acid
  misc_feature (31)..(31): n stands for inosine
uauuccuccugaugaggccguuaggccgaancuuacca

SEQ ID NO: 12265 - RNA, 38 nt, Artificial Sequence
  Description of Artificial Sequence:  Enzymatic Nucleic Acid
  misc_feature (31)..(31): n stands for inosine
ugaaaaugcugaugaggccguuaggccgaanacauauu

SEQ ID NO: 12266 - RNA, 38 nt, Artificial Sequence
  Description of Artificial Sequence:  Enzymatic Nucleic Acid
  misc_feature (31)..(31): n stands for inosine
acugaaaacugaugaggccguuaggccgaanugacaua

SEQ ID NO: 12267 - RNA, 38 nt, Artificial Sequence
  Description of Artificial Sequence:  Enzymatic Nucleic Acid
  misc_feature (31)..(31): n stands for inosine
ucuuugaccugaugaggccguuaggccgaanaaaaugu

SEQ ID NO: 12268 - RNA, 38 nt, Artificial Sequence
  Description of Artificial Sequence:  Enzymatic Nucleic Acid
  misc_feature (31)..(31): n stands for inosine
ugguucuucugaugaggccguuaggccgaanacugaaa

SEQ ID NO: 12269 - RNA, 37 nt, Artificial Sequence
  Description of Artificial Sequence:  Enzymatic Nucleic Acid
gaaaauaggccgaaaggcgagugaggucucagaauuc

SEQ ID NO: 12270 - RNA, 37 nt, Artificial Sequence
  Description of Artificial Sequence:  Enzymatic Nucleic Acid
cggaacgggccgaaaggcgagugaggucuaggaggaa

SEQ ID NO: 12271 - RNA, 37 nt, Artificial Sequence
  Description of Artificial Sequence:  Enzymatic Nucleic Acid
agucggaagccgaaaggcgagugaggucuggcaggag

SEQ ID NO: 12272 - RNA, 37 nt, Artificial Sequence
  Description of Artificial Sequence:  Enzymatic Nucleic Acid
cucugguggccgaaaggcgagugaggucucgagucgg

SEQ ID NO: 12273 - RNA, 37 nt, Artificial Sequence
  Description of Artificial Sequence:  Enzymatic Nucleic Acid
gagacagagccgaaaggcgagugaggucuucuggugc

SEQ ID NO: 12274 - RNA, 37 nt, Artificial Sequence
  Description of Artificial Sequence:  Enzymatic Nucleic Acid
aguagagagccgaaaggcgagugaggucuagacucug

SEQ ID NO: 12275 - RNA, 37 nt, Artificial Sequence
  Description of Artificial Sequence:  Enzymatic Nucleic Acid
acgcgcuggccgaaaggcgagugaggucuguucucag

SEQ ID NO: 12276 - RNA, 37 nt, Artificial Sequence
  Description of Artificial Sequence:  Enzymatic Nucleic Acid
cugacgcggccgaaaggcgagugaggucuugcguucu

SEQ ID NO: 12277 - RNA, 37 nt, Artificial Sequence
  Description of Artificial Sequence:  Enzymatic Nucleic Acid
cccugacggccgaaaggcgagugaggucugcugcguu

SEQ ID NO: 12278 - RNA, 37 nt, Artificial Sequence
  Description of Artificial Sequence:  Enzymatic Nucleic Acid
ggcccugagccgaaaggcgagugaggucugcgcugcg

SEQ ID NO: 12279 - RNA, 37 nt, Artificial Sequence
  Description of Artificial Sequence:  Enzymatic Nucleic Acid
gagcucgggccgaaaggcgagugaggucuccugacgc

SEQ ID NO: 12280 - RNA, 37 nt, Artificial Sequence
  Description of Artificial Sequence:  Enzymatic Nucleic Acid
gugaagaggccgaaaggcgagugaggucuucggcccu

SEQ ID NO: 12281 - RNA, 37 nt, Artificial Sequence
  Description of Artificial Sequence:  Enzymatic Nucleic Acid
ggagcagggccgaaaggcgagugaggucucagugaag

SEQ ID NO: 12282 - RNA, 37 nt, Artificial Sequence
  Description of Artificial Sequence:  Enzymatic Nucleic Acid
gcgcggaggccgaaaggcgagugaggucuaggccagu

SEQ ID NO: 12283 - RNA, 37 nt, Artificial Sequence
  Description of Artificial Sequence:  Enzymatic Nucleic Acid
gaagagcggccgaaaggcgagugaggucuggagcagg

SEQ ID NO: 12284 - RNA, 37 nt, Artificial Sequence
  Description of Artificial Sequence:  Enzymatic Nucleic Acid
uugaagaggccgaaaggcgagugaggucugcggagca

SEQ ID NO: 12285 - RNA, 37 nt, Artificial Sequence
  Description of Artificial Sequence:  Enzymatic Nucleic Acid
ggcgcugggccgaaaggcgagugaggucuauugaaga

SEQ ID NO: 12286 - RNA, 37 nt, Artificial Sequence
  Description of Artificial Sequence:  Enzymatic Nucleic Acid
gccuggcggccgaaaggcgagugaggucuuggcauug

SEQ ID NO: 12287 - RNA, 37 nt, Artificial Sequence
  Description of Artificial Sequence:  Enzymatic Nucleic Acid
gcgccugggccgaaaggcgagugaggucugcuggcau

SEQ ID NO: 12288 - RNA, 37 nt, Artificial Sequence
  Description of Artificial Sequence:  Enzymatic Nucleic Acid
ggugagcggccgaaaggcgagugaggucucuggcgcu

SEQ ID NO: 12289 - RNA, 37 nt, Artificial Sequence
  Description of Artificial Sequence:  Enzymatic Nucleic Acid
agggugaggccgaaaggcgagugaggucugccuggcg

SEQ ID NO: 12290 - RNA, 37 nt, Artificial Sequence
  Description of Artificial Sequence:  Enzymatic Nucleic Acid
acgcucuggccgaaaggcgagugaggucuagggugag

SEQ ID NO: 12291 - RNA, 37 nt, Artificial Sequence
  Description of Artificial Sequence:  Enzymatic Nucleic Acid
gcgggacggccgaaaggcgagugaggucuucugcagg

SEQ ID NO: 12292 - RNA, 37 nt, Artificial Sequence
  Description of Artificial Sequence:  Enzymatic Nucleic Acid
aggcgggagccgaaaggcgagugaggucugcucugca

SEQ ID NO: 12293 - RNA, 37 nt, Artificial Sequence
  Description of Artificial Sequence:  Enzymatic Nucleic Acid
uugagagggccgaaaggcgagugaggucugggacgcu

SEQ ID NO: 12294 - RNA, 37 nt, Artificial Sequence
  Description of Artificial Sequence:  Enzymatic Nucleic Acid
gggucacagccgaaaggcgagugaggucucccucuuu

SEQ ID NO: 12295 - RNA, 37 nt, Artificial Sequence
  Description of Artificial Sequence:  Enzymatic Nucleic Acid
gcgggucagccgaaaggcgagugaggucuaccccucu

SEQ ID NO: 12296 - RNA, 37 nt, Artificial Sequence
  Description of Artificial Sequence:  Enzymatic Nucleic Acid
uaaacucggccgaaaggcgagugaggucugggucaca

SEQ ID NO: 12297 - RNA, 37 nt, Artificial Sequence
  Description of Artificial Sequence:  Enzymatic Nucleic Acid
uaucuaaagccgaaaggcgagugaggucuucgcgggu

SEQ ID NO: 12298 - RNA, 37 nt, Artificial Sequence
  Description of Artificial Sequence:  Enzymatic Nucleic Acid
ggcaggaagccgaaaggcgagugaggucucuccuauc

SEQ ID NO: 12299 - RNA, 37 nt, Artificial Sequence
  Description of Artificial Sequence:  Enzymatic Nucleic Acid
ccccacgggccgaaaggcgagugaggucuaggaaccu

SEQ ID NO: 12300 - RNA, 37 nt, Artificial Sequence
  Description of Artificial Sequence:  Enzymatic Nucleic Acid
guuccccagccgaaaggcgagugaggucuggcaggaa

SEQ ID NO: 12301 - RNA, 37 nt, Artificial Sequence
  Description of Artificial Sequence:  Enzymatic Nucleic Acid
gagggcgggccgaaaggcgagugaggucugggguguu

SEQ ID NO: 12302 - RNA, 37 nt, Artificial Sequence
  Description of Artificial Sequence:  Enzymatic Nucleic Acid
uccgaggggccgaaaggcgagugaggucuggcggggu

SEQ ID NO: 12303 - RNA, 37 nt, Artificial Sequence
  Description of Artificial Sequence:  Enzymatic Nucleic Acid
agaaaaaggccgaaaggcgagugaggucuuccgaggg

SEQ ID NO: 12304 - RNA, 37 nt, Artificial Sequence
  Description of Artificial Sequence:  Enzymatic Nucleic Acid
cugcgccagccgaaaggcgagugaggucuagaaaaag

SEQ ID NO: 12305 - RNA, 37 nt, Artificial Sequence
  Description of Artificial Sequence:  Enzymatic Nucleic Acid
aagcugcggccgaaaggcgagugaggucucacagaaa

SEQ ID NO: 12306 - RNA, 37 nt, Artificial Sequence
  Description of Artificial Sequence:  Enzymatic Nucleic Acid
agaagcuggccgaaaggcgagugaggucugccacaga

SEQ ID NO: 12307 - RNA, 37 nt, Artificial Sequence
  Description of Artificial Sequence:  Enzymatic Nucleic Acid
cggagaaggccgaaaggcgagugaggucuugcgccac

SEQ ID NO: 12308 - RNA, 37 nt, Artificial Sequence
  Description of Artificial Sequence:  Enzymatic Nucleic Acid
ggcucggggccgaaaggcgagugaggucuggagaagc

SEQ ID NO: 12309 - RNA, 37 nt, Artificial Sequence
  Description of Artificial Sequence:  Enzymatic Nucleic Acid
gcgcgcgggccgaaaggcgagugaggucuucgggcgg

SEQ ID NO: 12310 - RNA, 37 nt, Artificial Sequence
  Description of Artificial Sequence:  Enzymatic Nucleic Acid
uccgcgcggccgaaaggcgagugaggucuggcucggg

SEQ ID NO: 12311 - RNA, 37 nt, Artificial Sequence
  Description of Artificial Sequence:  Enzymatic Nucleic Acid
gcuccgcggccgaaaggcgagugaggucugcggcucg

SEQ ID NO: 12312 - RNA, 37 nt, Artificial Sequence
  Description of Artificial Sequence:  Enzymatic Nucleic Acid
cagcuccggccgaaaggcgagugaggucugcgcggcu

SEQ ID NO: 12313 - RNA, 37 nt, Artificial Sequence
  Description of Artificial Sequence:  Enzymatic Nucleic Acid
cccggcaggccgaaaggcgagugaggucuuccgcgcg

SEQ ID NO: 12314 - RNA, 37 nt, Artificial Sequence
  Description of Artificial Sequence:  Enzymatic Nucleic Acid
gcccccgggccgaaaggcgagugaggucuagcuccgc

SEQ ID NO: 12315 - RNA, 37 nt, Artificial Sequence
  Description of Artificial Sequence:  Enzymatic Nucleic Acid
cuaaggaggccgaaaggcgagugaggucuccccggca

SEQ ID NO: 12316 - RNA, 37 nt, Artificial Sequence
  Description of Artificial Sequence:  Enzymatic Nucleic Acid
cccggguggccgaaaggcgagugaggucuuaaggagc

SEQ ID NO: 12317 - RNA, 37 nt, Artificial Sequence
  Description of Artificial Sequence:  Enzymatic Nucleic Acid
ccccggcggccgaaaggcgagugaggucuccgggugc

SEQ ID NO: 12318 - RNA, 37 nt, Artificial Sequence
  Description of Artificial Sequence:  Enzymatic Nucleic Acid
ggccccgggccgaaaggcgagugaggucugcccgggu

SEQ ID NO: 12319 - RNA, 37 nt, Artificial Sequence
  Description of Artificial Sequence:  Enzymatic Nucleic Acid
ggcgaggggccgaaaggcgagugaggucucccggcgc

SEQ ID NO: 12320 - RNA, 37 nt, Artificial Sequence
  Description of Artificial Sequence:  Enzymatic Nucleic Acid
cggaaggggccgaaaggcgagugaggucugagggccc

SEQ ID NO: 12321 - RNA, 37 nt, Artificial Sequence
  Description of Artificial Sequence:  Enzymatic Nucleic Acid
gaaggcuggccgaaaggcgagugaggucuggaagggc

SEQ ID NO: 12322 - RNA, 37 nt, Artificial Sequence
  Description of Artificial Sequence:  Enzymatic Nucleic Acid
agugaagggccgaaaggcgagugaggucuugcggaag

SEQ ID NO: 12323 - RNA, 37 nt, Artificial Sequence
  Description of Artificial Sequence:  Enzymatic Nucleic Acid
gcagaggggccgaaaggcgagugaggucuuggaguga

SEQ ID NO: 12324 - RNA, 37 nt, Artificial Sequence
  Description of Artificial Sequence:  Enzymatic Nucleic Acid
ugcgggaggccgaaaggcgagugaggucuagagggcu

SEQ ID NO: 12325 - RNA, 37 nt, Artificial Sequence
  Description of Artificial Sequence:  Enzymatic Nucleic Acid
auggcguggccgaaaggcgagugaggucugggagcag

SEQ ID NO: 12326 - RNA, 37 nt, Artificial Sequence
  Description of Artificial Sequence:  Enzymatic Nucleic Acid
cuucaugggccgaaaggcgagugaggucugugcggga

SEQ ID NO: 12327 - RNA, 37 nt, Artificial Sequence
  Description of Artificial Sequence:  Enzymatic Nucleic Acid
aacggcgagccgaaaggcgagugaggucuuucauggc

SEQ ID NO: 12328 - RNA, 37 nt, Artificial Sequence
  Description of Artificial Sequence:  Enzymatic Nucleic Acid
uagaacgggccgaaaggcgagugaggucugacuucau

SEQ ID NO: 12329 - RNA, 37 nt, Artificial Sequence
  Description of Artificial Sequence:  Enzymatic Nucleic Acid
cgguagaagccgaaaggcgagugaggucuggcgacuu

SEQ ID NO: 12330 - RNA, 37 nt, Artificial Sequence
  Description of Artificial Sequence:  Enzymatic Nucleic Acid
ucuggcaggccgaaaggcgagugaggucugguagaac

SEQ ID NO: 12331 - RNA, 37 nt, Artificial Sequence
  Description of Artificial Sequence:  Enzymatic Nucleic Acid
uguucugggccgaaaggcgagugaggucuagcgguag

SEQ ID NO: 12332 - RNA, 37 nt, Artificial Sequence
  Description of Artificial Sequence:  Enzymatic Nucleic Acid
uuuuuccagccgaaaggcgagugaggucuagaggugg

SEQ ID NO: 12333 - RNA, 37 nt, Artificial Sequence
  Description of Artificial Sequence:  Enzymatic Nucleic Acid
ccgaguuggccgaaaggcgagugaggucucuuuuucc

SEQ ID NO: 12334 - RNA, 37 nt, Artificial Sequence
  Description of Artificial Sequence:  Enzymatic Nucleic Acid
caucaccggccgaaaggcgagugaggucucgaguugc

SEQ ID NO: 12335 - RNA, 37 nt, Artificial Sequence
  Description of Artificial Sequence:  Enzymatic Nucleic Acid
gcccaucagccgaaaggcgagugaggucucgccgagu

SEQ ID NO: 12336 - RNA, 37 nt, Artificial Sequence
  Description of Artificial Sequence:  Enzymatic Nucleic Acid
gcaccccggccgaaaggcgagugaggucuccaucacc

SEQ ID NO: 12337 - RNA, 37 nt, Artificial Sequence
  Description of Artificial Sequence:  Enzymatic Nucleic Acid
gaagagcagccgaaaggcgagugaggucucccgccca

SEQ ID NO: 12338 - RNA, 37 nt, Artificial Sequence
  Description of Artificial Sequence:  Enzymatic Nucleic Acid
cugaagaggccgaaaggcgagugaggucuaccccgcc

SEQ ID NO: 12339 - RNA, 37 nt, Artificial Sequence
  Description of Artificial Sequence:  Enzymatic Nucleic Acid
ggccgguggccgaaaggcgagugaggucuugaagagc

SEQ ID NO: 12340 - RNA, 37 nt, Artificial Sequence
  Description of Artificial Sequence:  Enzymatic Nucleic Acid
ccaggagggccgaaaggcgagugaggucucggugcug

SEQ ID NO: 12341 - RNA, 37 nt, Artificial Sequence
  Description of Artificial Sequence:  Enzymatic Nucleic Acid
gcagguuggccgaaaggcgagugaggucuccaggagg

SEQ ID NO: 12342 - RNA, 37 nt, Artificial Sequence
  Description of Artificial Sequence:  Enzymatic Nucleic Acid
agggccaggccgaaaggcgagugaggucuagguugcc

SEQ ID NO: 12343 - RNA, 37 nt, Artificial Sequence
  Description of Artificial Sequence:  Enzymatic Nucleic Acid
ccccaggggccgaaaggcgagugaggucucagcaggu

SEQ ID NO: 12344 - RNA, 37 nt, Artificial Sequence
  Description of Artificial Sequence:  Enzymatic Nucleic Acid
gccagcaggccgaaaggcgagugaggucucccagggc

SEQ ID NO: 12345 - RNA, 37 nt, Artificial Sequence
  Description of Artificial Sequence:  Enzymatic Nucleic Acid
cgcgccaggccgaaaggcgagugaggucuagccccag

SEQ ID NO: 12346 - RNA, 37 nt, Artificial Sequence
  Description of Artificial Sequence:  Enzymatic Nucleic Acid
cgagcgcggccgaaaggcgagugaggucucagcagcc

SEQ ID NO: 12347 - RNA, 37 nt, Artificial Sequence
  Description of Artificial Sequence:  Enzymatic Nucleic Acid
cccgagcggccgaaaggcgagugaggucugccagcag

SEQ ID NO: 12348 - RNA, 37 nt, Artificial Sequence
  Description of Artificial Sequence:  Enzymatic Nucleic Acid
gccccgaggccgaaaggcgagugaggucugcgccagc

SEQ ID NO: 12349 - RNA, 37 nt, Artificial Sequence
  Description of Artificial Sequence:  Enzymatic Nucleic Acid
caccccaggccgaaaggcgagugaggucucccgagcg

SEQ ID NO: 12350 - RNA, 37 nt, Artificial Sequence
  Description of Artificial Sequence:  Enzymatic Nucleic Acid
gagcaccagccgaaaggcgagugaggucucccagccc

SEQ ID NO: 12351 - RNA, 37 nt, Artificial Sequence
  Description of Artificial Sequence:  Enzymatic Nucleic Acid
cgcgagcagccgaaaggcgagugaggucucaccccag

SEQ ID NO: 12352 - RNA, 37 nt, Artificial Sequence
  Description of Artificial Sequence:  Enzymatic Nucleic Acid
gccgcgaggccgaaaggcgagugaggucuaccacccc

SEQ ID NO: 12353 - RNA, 37 nt, Artificial Sequence
  Description of Artificial Sequence:  Enzymatic Nucleic Acid
ggacgccggccgaaaggcgagugaggucugagcacca

SEQ ID NO: 12354 - RNA, 37 nt, Artificial Sequence
  Description of Artificial Sequence:  Enzymatic Nucleic Acid
aguggacggccgaaaggcgagugaggucucgcgagca

SEQ ID NO: 12355 - RNA, 37 nt, Artificial Sequence
  Description of Artificial Sequence:  Enzymatic Nucleic Acid
gcaguggagccgaaaggcgagugaggucugccgcgag

SEQ ID NO: 12356 - RNA, 37 nt, Artificial Sequence
  Description of Artificial Sequence:  Enzymatic Nucleic Acid
agcgggcggccgaaaggcgagugaggucuaguggacg

SEQ ID NO: 12357 - RNA, 37 nt, Artificial Sequence
  Description of Artificial Sequence:  Enzymatic Nucleic Acid
gcagcggggccgaaaggcgagugaggucugcagugga

SEQ ID NO: 12358 - RNA, 37 nt, Artificial Sequence
  Description of Artificial Sequence:  Enzymatic Nucleic Acid
gagggcaggccgaaaggcgagugaggucugggcgcag

SEQ ID NO: 12359 - RNA, 37 nt, Artificial Sequence
  Description of Artificial Sequence:  Enzymatic Nucleic Acid
accgaggggccgaaaggcgagugaggucuagcgggcg

SEQ ID NO: 12360 - RNA, 37 nt, Artificial Sequence
  Description of Artificial Sequence:  Enzymatic Nucleic Acid
guagaagagccgaaaggcgagugaggucucgagggca

SEQ ID NO: 12361 - RNA, 37 nt, Artificial Sequence
  Description of Artificial Sequence:  Enzymatic Nucleic Acid
cacaccaggccgaaaggcgagugaggucuauguagaa

SEQ ID NO: 12362 - RNA, 37 nt, Artificial Sequence
  Description of Artificial Sequence:  Enzymatic Nucleic Acid
gccacacagccgaaaggcgagugaggucucagcaugu

SEQ ID NO: 12363 - RNA, 37 nt, Artificial Sequence
  Description of Artificial Sequence:  Enzymatic Nucleic Acid
aggccacagccgaaaggcgagugaggucuaccagcau

SEQ ID NO: 12364 - RNA, 37 nt, Artificial Sequence
  Description of Artificial Sequence:  Enzymatic Nucleic Acid
ucaggccagccgaaaggcgagugaggucuacaccagc

SEQ ID NO: 12365 - RNA, 37 nt, Artificial Sequence
  Description of Artificial Sequence:  Enzymatic Nucleic Acid
ccgucagggccgaaaggcgagugaggucucacacacc

SEQ ID NO: 12366 - RNA, 37 nt, Artificial Sequence
  Description of Artificial Sequence:  Enzymatic Nucleic Acid
gucggugagccgaaaggcgagugaggucucgucaggc

SEQ ID NO: 12367 - RNA, 37 nt, Artificial Sequence
  Description of Artificial Sequence:  Enzymatic Nucleic Acid
uugcccaggccgaaaggcgagugaggucuaagucggu

SEQ ID NO: 12368 - RNA, 37 nt, Artificial Sequence
  Description of Artificial Sequence:  Enzymatic Nucleic Acid
ggcacuuggccgaaaggcgagugaggucuccagcaag

SEQ ID NO: 12369 - RNA, 37 nt, Artificial Sequence
  Description of Artificial Sequence:  Enzymatic Nucleic Acid
aggaggcagccgaaaggcgagugaggucuuugcccag

SEQ ID NO: 12370 - RNA, 37 nt, Artificial Sequence
  Description of Artificial Sequence:  Enzymatic Nucleic Acid
uuaggagggccgaaaggcgagugaggucuacuugccc

SEQ ID NO: 12371 - RNA, 37 nt, Artificial Sequence
  Description of Artificial Sequence:  Enzymatic Nucleic Acid
ccaccggggccgaaaggcgagugaggucuuuaggagg

SEQ ID NO: 12372 - RNA, 37 nt, Artificial Sequence
  Description of Artificial Sequence:  Enzymatic Nucleic Acid
cagcaccagccgaaaggcgagugaggucucgggcuua

SEQ ID NO: 12373 - RNA, 37 nt, Artificial Sequence
  Description of Artificial Sequence:  Enzymatic Nucleic Acid
agccagcagccgaaaggcgagugaggucucaccgggc

SEQ ID NO: 12374 - RNA, 37 nt, Artificial Sequence
  Description of Artificial Sequence:  Enzymatic Nucleic Acid
gcagccaggccgaaaggcgagugaggucuaccaccgg

SEQ ID NO: 12375 - RNA, 37 nt, Artificial Sequence
  Description of Artificial Sequence:  Enzymatic Nucleic Acid
guaggcaggccgaaaggcgagugaggucucagcacca

SEQ ID NO: 12376 - RNA, 37 nt, Artificial Sequence
  Description of Artificial Sequence:  Enzymatic Nucleic Acid
agcguagggccgaaaggcgagugaggucuagccagca

SEQ ID NO: 12377 - RNA, 37 nt, Artificial Sequence
  Description of Artificial Sequence:  Enzymatic Nucleic Acid
guucugaggccgaaaggcgagugaggucuguaggcag

SEQ ID NO: 12378 - RNA, 37 nt, Artificial Sequence
  Description of Artificial Sequence:  Enzymatic Nucleic Acid
cccgcagagccgaaaggcgagugaggucuuccgguuc

SEQ ID NO: 12379 - RNA, 37 nt, Artificial Sequence
  Description of Artificial Sequence:  Enzymatic Nucleic Acid
agcacccggccgaaaggcgagugaggucuagacuccg

SEQ ID NO: 12380 - RNA, 37 nt, Artificial Sequence
  Description of Artificial Sequence:  Enzymatic Nucleic Acid
cgcaagcagccgaaaggcgagugaggucuccgcagac

SEQ ID NO: 12381 - RNA, 37 nt, Artificial Sequence
  Description of Artificial Sequence:  Enzymatic Nucleic Acid
ggcgcaaggccgaaaggcgagugaggucuacccgcag

SEQ ID NO: 12382 - RNA, 37 nt, Artificial Sequence
  Description of Artificial Sequence:  Enzymatic Nucleic Acid
ugcgggcggccgaaaggcgagugaggucuaagcaccc

SEQ ID NO: 12383 - RNA, 37 nt, Artificial Sequence
  Description of Artificial Sequence:  Enzymatic Nucleic Acid
aaugcggggccgaaaggcgagugaggucugcaagcac

SEQ ID NO: 12384 - RNA, 37 nt, Artificial Sequence
  Description of Artificial Sequence:  Enzymatic Nucleic Acid
guccaauggccgaaaggcgagugaggucugggcgcaa

SEQ ID NO: 12385 - RNA, 37 nt, Artificial Sequence
  Description of Artificial Sequence:  Enzymatic Nucleic Acid
uggcacaagccgaaaggcgagugaggucugaguuguc

SEQ ID NO: 12386 - RNA, 37 nt, Artificial Sequence
  Description of Artificial Sequence:  Enzymatic Nucleic Acid
gcuuggcagccgaaaggcgagugaggucuaacgaguu

SEQ ID NO: 12387 - RNA, 37 nt, Artificial Sequence
  Description of Artificial Sequence:  Enzymatic Nucleic Acid
aggcuugggccgaaaggcgagugaggucuacaacgag

SEQ ID NO: 12388 - RNA, 37 nt, Artificial Sequence
  Description of Artificial Sequence:  Enzymatic Nucleic Acid
ggcgaagggccgaaaggcgagugaggucuuuggcaca

SEQ ID NO: 12389 - RNA, 37 nt, Artificial Sequence
  Description of Artificial Sequence:  Enzymatic Nucleic Acid
gaagaagggccgaaaggcgagugaggucugaaggcuu

SEQ ID NO: 12390 - RNA, 37 nt, Artificial Sequence
  Description of Artificial Sequence:  Enzymatic Nucleic Acid
aagaaggagccgaaaggcgagugaggucuaugaagaa

SEQ ID NO: 12391 - RNA, 37 nt, Artificial Sequence
  Description of Artificial Sequence:  Enzymatic Nucleic Acid
gaggagaggccgaaaggcgagugaggucuccaaagaa

SEQ ID NO: 12392 - RNA, 37 nt, Artificial Sequence
  Description of Artificial Sequence:  Enzymatic Nucleic Acid
aggaguuggccgaaaggcgagugaggucuagugucga

SEQ ID NO: 12393 - RNA, 37 nt, Artificial Sequence
  Description of Artificial Sequence:  Enzymatic Nucleic Acid
ugccaugggccgaaaggcgagugaggucucaggaguu

SEQ ID NO: 12394 - RNA, 37 nt, Artificial Sequence
  Description of Artificial Sequence:  Enzymatic Nucleic Acid
cuccaguggccgaaaggcgagugaggucucauggcca

SEQ ID NO: 12395 - RNA, 37 nt, Artificial Sequence
  Description of Artificial Sequence:  Enzymatic Nucleic Acid
agccagcagccgaaaggcgagugaggucuuccagugc

SEQ ID NO: 12396 - RNA, 37 nt, Artificial Sequence
  Description of Artificial Sequence:  Enzymatic Nucleic Acid
agagccaggccgaaaggcgagugaggucuacuccagu

SEQ ID NO: 12397 - RNA, 37 nt, Artificial Sequence
  Description of Artificial Sequence:  Enzymatic Nucleic Acid
agggagaggccgaaaggcgagugaggucucagcacuc

SEQ ID NO: 12398 - RNA, 37 nt, Artificial Sequence
  Description of Artificial Sequence:  Enzymatic Nucleic Acid
aaaggguggccgaaaggcgagugaggucuccuaggga

SEQ ID NO: 12399 - RNA, 37 nt, Artificial Sequence
  Description of Artificial Sequence:  Enzymatic Nucleic Acid
gugauguggccgaaaggcgagugaggucucgucggua

SEQ ID NO: 12400 - RNA, 37 nt, Artificial Sequence
  Description of Artificial Sequence:  Enzymatic Nucleic Acid
cccaggcggccgaaaggcgagugaggucuagggugau

SEQ ID NO: 12401 - RNA, 37 nt, Artificial Sequence
  Description of Artificial Sequence:  Enzymatic Nucleic Acid
cgcccagggccgaaaggcgagugaggucugcagggug

SEQ ID NO: 12402 - RNA, 37 nt, Artificial Sequence
  Description of Artificial Sequence:  Enzymatic Nucleic Acid
ccagugcggccgaaaggcgagugaggucuccaggcgc

SEQ ID NO: 12403 - RNA, 37 nt, Artificial Sequence
  Description of Artificial Sequence:  Enzymatic Nucleic Acid
caccaguggccgaaaggcgagugaggucugcccaggc

SEQ ID NO: 12404 - RNA, 37 nt, Artificial Sequence
  Description of Artificial Sequence:  Enzymatic Nucleic Acid
cggggccagccgaaaggcgagugaggucucagugcgc

SEQ ID NO: 12405 - RNA, 37 nt, Artificial Sequence
  Description of Artificial Sequence:  Enzymatic Nucleic Acid
caccgggggccgaaaggcgagugaggucucaccagug

SEQ ID NO: 12406 - RNA, 37 nt, Artificial Sequence
  Description of Artificial Sequence:  Enzymatic Nucleic Acid
gcucaccagccgaaaggcgagugaggucucggggcca

SEQ ID NO: 12407 - RNA, 37 nt, Artificial Sequence
  Description of Artificial Sequence:  Enzymatic Nucleic Acid
ggcgcucagccgaaaggcgagugaggucucaccgggg

SEQ ID NO: 12408 - RNA, 37 nt, Artificial Sequence
  Description of Artificial Sequence:  Enzymatic Nucleic Acid
agaaggcggccgaaaggcgagugaggucuucaccacc

SEQ ID NO: 12409 - RNA, 37 nt, Artificial Sequence
  Description of Artificial Sequence:  Enzymatic Nucleic Acid
ggagaagggccgaaaggcgagugaggucugcucacca

SEQ ID NO: 12410 - RNA, 37 nt, Artificial Sequence
  Description of Artificial Sequence:  Enzymatic Nucleic Acid
gcagaaaggccgaaaggcgagugaggucucagggaga

SEQ ID NO: 12411 - RNA, 37 nt, Artificial Sequence
  Description of Artificial Sequence:  Enzymatic Nucleic Acid
guagcgcggccgaaaggcgagugaggucuagaaagcc

SEQ ID NO: 12412 - RNA, 37 nt, Artificial Sequence
  Description of Artificial Sequence:  Enzymatic Nucleic Acid
agguagcggccgaaaggcgagugaggucugcagaaag

SEQ ID NO: 12413 - RNA, 37 nt, Artificial Sequence
  Description of Artificial Sequence:  Enzymatic Nucleic Acid
aaagguaggccgaaaggcgagugaggucugcgcagaa

SEQ ID NO: 12414 - RNA, 37 nt, Artificial Sequence
  Description of Artificial Sequence:  Enzymatic Nucleic Acid
ucccgaaggccgaaaggcgagugaggucuccaugaaa

SEQ ID NO: 12415 - RNA, 37 nt, Artificial Sequence
  Description of Artificial Sequence:  Enzymatic Nucleic Acid
ugcacgaagccgaaaggcgagugaggucuuucccgaa

SEQ ID NO: 12416 - RNA, 37 nt, Artificial Sequence
  Description of Artificial Sequence:  Enzymatic Nucleic Acid
guacugcagccgaaaggcgagugaggucugaacuucc

SEQ ID NO: 12417 - RNA, 37 nt, Artificial Sequence
  Description of Artificial Sequence:  Enzymatic Nucleic Acid
caguacuggccgaaaggcgagugaggucuacgaacuu

SEQ ID NO: 12418 - RNA, 37 nt, Artificial Sequence
  Description of Artificial Sequence:  Enzymatic Nucleic Acid
gggcaguagccgaaaggcgagugaggucuugcacgaa

SEQ ID NO: 12419 - RNA, 37 nt, Artificial Sequence
  Description of Artificial Sequence:  Enzymatic Nucleic Acid
ugccgggggccgaaaggcgagugaggucuaguacugc

SEQ ID NO: 12420 - RNA, 37 nt, Artificial Sequence
  Description of Artificial Sequence:  Enzymatic Nucleic Acid
accagguggccgaaaggcgagugaggucucggggcag

SEQ ID NO: 12421 - RNA, 37 nt, Artificial Sequence
  Description of Artificial Sequence:  Enzymatic Nucleic Acid
auaaagcagccgaaaggcgagugaggucucaggugcc

SEQ ID NO: 12422 - RNA, 37 nt, Artificial Sequence
  Description of Artificial Sequence:  Enzymatic Nucleic Acid
ggauaaaggccgaaaggcgagugaggucuaccaggug

SEQ ID NO: 12423 - RNA, 37 nt, Artificial Sequence
  Description of Artificial Sequence:  Enzymatic Nucleic Acid
cucguggagccgaaaggcgagugaggucucaucugga

SEQ ID NO: 12424 - RNA, 37 nt, Artificial Sequence
  Description of Artificial Sequence:  Enzymatic Nucleic Acid
acagcgaggccgaaaggcgagugaggucuccuccucg

SEQ ID NO: 12425 - RNA, 37 nt, Artificial Sequence
  Description of Artificial Sequence:  Enzymatic Nucleic Acid
accgacaggccgaaaggcgagugaggucugagcccuc

SEQ ID NO: 12426 - RNA, 37 nt, Artificial Sequence
  Description of Artificial Sequence:  Enzymatic Nucleic Acid
agcaccgagccgaaaggcgagugaggucuagcgagcc

SEQ ID NO: 12427 - RNA, 37 nt, Artificial Sequence
  Description of Artificial Sequence:  Enzymatic Nucleic Acid
ccccagcagccgaaaggcgagugaggucucgacagcg

SEQ ID NO: 12428 - RNA, 37 nt, Artificial Sequence
  Description of Artificial Sequence:  Enzymatic Nucleic Acid
uaccccaggccgaaaggcgagugaggucuaccgacag

SEQ ID NO: 12429 - RNA, 37 nt, Artificial Sequence
  Description of Artificial Sequence:  Enzymatic Nucleic Acid
acagaguagccgaaaggcgagugaggucucccagcac

SEQ ID NO: 12430 - RNA, 37 nt, Artificial Sequence
  Description of Artificial Sequence:  Enzymatic Nucleic Acid
guagagcagccgaaaggcgagugaggucuagaguacc

SEQ ID NO: 12431 - RNA, 37 nt, Artificial Sequence
  Description of Artificial Sequence:  Enzymatic Nucleic Acid
gaguagaggccgaaaggcgagugaggucuacagagua

SEQ ID NO: 12432 - RNA, 37 nt, Artificial Sequence
  Description of Artificial Sequence:  Enzymatic Nucleic Acid
ccaugagggccgaaaggcgagugaggucuuggaguag

SEQ ID NO: 12433 - RNA, 37 nt, Artificial Sequence
  Description of Artificial Sequence:  Enzymatic Nucleic Acid
cagcagcggccgaaaggcgagugaggucucaugaggc

SEQ ID NO: 12434 - RNA, 37 nt, Artificial Sequence
  Description of Artificial Sequence:  Enzymatic Nucleic Acid
accagcaggccgaaaggcgagugaggucugccaugag

SEQ ID NO: 12435 - RNA, 37 nt, Artificial Sequence
  Description of Artificial Sequence:  Enzymatic Nucleic Acid
aggaccaggccgaaaggcgagugaggucuagcgccau

SEQ ID NO: 12436 - RNA, 37 nt, Artificial Sequence
  Description of Artificial Sequence:  Enzymatic Nucleic Acid
ggcgaggagccgaaaggcgagugaggucucagcagcg

SEQ ID NO: 12437 - RNA, 37 nt, Artificial Sequence
  Description of Artificial Sequence:  Enzymatic Nucleic Acid
cacggugggccgaaaggcgagugaggucugaggacca

SEQ ID NO: 12438 - RNA, 37 nt, Artificial Sequence
  Description of Artificial Sequence:  Enzymatic Nucleic Acid
gcacagcagccgaaaggcgagugaggucugguggcga

SEQ ID NO: 12439 - RNA, 37 nt, Artificial Sequence
  Description of Artificial Sequence:  Enzymatic Nucleic Acid
uugcacaggccgaaaggcgagugaggucuacgguggc

SEQ ID NO: 12440 - RNA, 37 nt, Artificial Sequence
  Description of Artificial Sequence:  Enzymatic Nucleic Acid
agguugcagccgaaaggcgagugaggucuagcacggu

SEQ ID NO: 12441 - RNA, 37 nt, Artificial Sequence
  Description of Artificial Sequence:  Enzymatic Nucleic Acid
cgagguuggccgaaaggcgagugaggucuacagcacg

SEQ ID NO: 12442 - RNA, 37 nt, Artificial Sequence
  Description of Artificial Sequence:  Enzymatic Nucleic Acid
gcauggcggccgaaaggcgagugaggucucgagguug

SEQ ID NO: 12443 - RNA, 37 nt, Artificial Sequence
  Description of Artificial Sequence:  Enzymatic Nucleic Acid
gcgcaugggccgaaaggcgagugaggucugccgaggu

SEQ ID NO: 12444 - RNA, 37 nt, Artificial Sequence
  Description of Artificial Sequence:  Enzymatic Nucleic Acid
agguugcggccgaaaggcgagugaggucuauggcgcc

SEQ ID NO: 12445 - RNA, 37 nt, Artificial Sequence
  Description of Artificial Sequence:  Enzymatic Nucleic Acid
agagguuggccgaaaggcgagugaggucugcauggcg

SEQ ID NO: 12446 - RNA, 37 nt, Artificial Sequence
  Description of Artificial Sequence:  Enzymatic Nucleic Acid
gugcaucggccgaaaggcgagugaggucuauagaggu

SEQ ID NO: 12447 - RNA, 37 nt, Artificial Sequence
  Description of Artificial Sequence:  Enzymatic Nucleic Acid
cgccgguggccgaaaggcgagugaggucuaucgcaua

SEQ ID NO: 12448 - RNA, 37 nt, Artificial Sequence
  Description of Artificial Sequence:  Enzymatic Nucleic Acid
ugcagccggccgaaaggcgagugaggucucggugcau

SEQ ID NO: 12449 - RNA, 37 nt, Artificial Sequence
  Description of Artificial Sequence:  Enzymatic Nucleic Acid
cgcugcaggccgaaaggcgagugaggucucgccggug

SEQ ID NO: 12450 - RNA, 37 nt, Artificial Sequence
  Description of Artificial Sequence:  Enzymatic Nucleic Acid
ugccgcuggccgaaaggcgagugaggucuagccgccg

SEQ ID NO: 12451 - RNA, 37 nt, Artificial Sequence
  Description of Artificial Sequence:  Enzymatic Nucleic Acid
gggugccggccgaaaggcgagugaggucuugcagccg

SEQ ID NO: 12452 - RNA, 37 nt, Artificial Sequence
  Description of Artificial Sequence:  Enzymatic Nucleic Acid
cgcggguggccgaaaggcgagugaggucucgcugcag

SEQ ID NO: 12453 - RNA, 37 nt, Artificial Sequence
  Description of Artificial Sequence:  Enzymatic Nucleic Acid
caggagcggccgaaaggcgagugaggucugggugccg

SEQ ID NO: 12454 - RNA, 37 nt, Artificial Sequence
  Description of Artificial Sequence:  Enzymatic Nucleic Acid
ugcaggaggccgaaaggcgagugaggucugcgggugc

SEQ ID NO: 12455 - RNA, 37 nt, Artificial Sequence
  Description of Artificial Sequence:  Enzymatic Nucleic Acid
cccugguggccgaaaggcgagugaggucuaggagcgc

SEQ ID NO: 12456 - RNA, 37 nt, Artificial Sequence
  Description of Artificial Sequence:  Enzymatic Nucleic Acid
gcucggcagccgaaaggcgagugaggucuagucccug

SEQ ID NO: 12457 - RNA, 37 nt, Artificial Sequence
  Description of Artificial Sequence:  Enzymatic Nucleic Acid
cggcucgggccgaaaggcgagugaggucuacaguccc

SEQ ID NO: 12458 - RNA, 37 nt, Artificial Sequence
  Description of Artificial Sequence:  Enzymatic Nucleic Acid
gcgcgcgggccgaaaggcgagugaggucuucggcaca

SEQ ID NO: 12459 - RNA, 37 nt, Artificial Sequence
  Description of Artificial Sequence:  Enzymatic Nucleic Acid
uccgcgcggccgaaaggcgagugaggucuggcucggc

SEQ ID NO: 12460 - RNA, 37 nt, Artificial Sequence
  Description of Artificial Sequence:  Enzymatic Nucleic Acid
cguccgcggccgaaaggcgagugaggucugcggcucg

SEQ ID NO: 12461 - RNA, 37 nt, Artificial Sequence
  Description of Artificial Sequence:  Enzymatic Nucleic Acid
cccguccggccgaaaggcgagugaggucugcgcggcu

SEQ ID NO: 12462 - RNA, 37 nt, Artificial Sequence
  Description of Artificial Sequence:  Enzymatic Nucleic Acid
aggggacggccgaaaggcgagugaggucuuucccucc

SEQ ID NO: 12463 - RNA, 37 nt, Artificial Sequence
  Description of Artificial Sequence:  Enzymatic Nucleic Acid
ugaggggagccgaaaggcgagugaggucugcuucccu

SEQ ID NO: 12464 - RNA, 37 nt, Artificial Sequence
  Description of Artificial Sequence:  Enzymatic Nucleic Acid
uccagggggccgaaaggcgagugaggucuugagggga

SEQ ID NO: 12465 - RNA, 37 nt, Artificial Sequence
  Description of Artificial Sequence:  Enzymatic Nucleic Acid
ugauccaggccgaaaggcgagugaggucuuccuccag

SEQ ID NO: 12466 - RNA, 37 nt, Artificial Sequence
  Description of Artificial Sequence:  Enzymatic Nucleic Acid
gccagcaggccgaaaggcgagugaggucuaggaggug

SEQ ID NO: 12467 - RNA, 37 nt, Artificial Sequence
  Description of Artificial Sequence:  Enzymatic Nucleic Acid
agcgccaggccgaaaggcgagugaggucuagcaggag

SEQ ID NO: 12468 - RNA, 37 nt, Artificial Sequence
  Description of Artificial Sequence:  Enzymatic Nucleic Acid
caucagcggccgaaaggcgagugaggucucagcagca

SEQ ID NO: 12469 - RNA, 37 nt, Artificial Sequence
  Description of Artificial Sequence:  Enzymatic Nucleic Acid
gucaucaggccgaaaggcgagugaggucugccagcag

SEQ ID NO: 12470 - RNA, 37 nt, Artificial Sequence
  Description of Artificial Sequence:  Enzymatic Nucleic Acid
gaagagcagccgaaaggcgagugaggucuggucauca

SEQ ID NO: 12471 - RNA, 37 nt, Artificial Sequence
  Description of Artificial Sequence:  Enzymatic Nucleic Acid
gugaagaggccgaaaggcgagugaggucuacggucau

SEQ ID NO: 12472 - RNA, 37 nt, Artificial Sequence
  Description of Artificial Sequence:  Enzymatic Nucleic Acid
agagaacagccgaaaggcgagugaggucuauagugaa

SEQ ID NO: 12473 - RNA, 37 nt, Artificial Sequence
  Description of Artificial Sequence:  Enzymatic Nucleic Acid
gcagagaagccgaaaggcgagugaggucuacauagug

SEQ ID NO: 12474 - RNA, 37 nt, Artificial Sequence
  Description of Artificial Sequence:  Enzymatic Nucleic Acid
auuacggggccgaaaggcgagugaggucuagagaaca

SEQ ID NO: 12475 - RNA, 37 nt, Artificial Sequence
  Description of Artificial Sequence:  Enzymatic Nucleic Acid
auaaauuagccgaaaggcgagugaggucugggcagag

SEQ ID NO: 12476 - RNA, 37 nt, Artificial Sequence
  Description of Artificial Sequence:  Enzymatic Nucleic Acid
aguaagcggccgaaaggcgagugaggucugauaaauu

SEQ ID NO: 12477 - RNA, 37 nt, Artificial Sequence
  Description of Artificial Sequence:  Enzymatic Nucleic Acid
auaguaaggccgaaaggcgagugaggucugcgauaaa

SEQ ID NO: 12478 - RNA, 37 nt, Artificial Sequence
  Description of Artificial Sequence:  Enzymatic Nucleic Acid
cuuaaauggccgaaaggcgagugaggucuuccauagu

SEQ ID NO: 12479 - RNA, 37 nt, Artificial Sequence
  Description of Artificial Sequence:  Enzymatic Nucleic Acid
cuccuugagccgaaaggcgagugaggucuauccuuaa

SEQ ID NO: 12480 - RNA, 37 nt, Artificial Sequence
  Description of Artificial Sequence:  Enzymatic Nucleic Acid
gucuucuggccgaaaggcgagugaggucuuucuucag

SEQ ID NO: 12481 - RNA, 37 nt, Artificial Sequence
  Description of Artificial Sequence:  Enzymatic Nucleic Acid
ucgcaagggccgaaaggcgagugaggucuucggaggu

SEQ ID NO: 12482 - RNA, 37 nt, Artificial Sequence
  Description of Artificial Sequence:  Enzymatic Nucleic Acid
agaaaucggccgaaaggcgagugaggucuaaggcucg

SEQ ID NO: 12483 - RNA, 37 nt, Artificial Sequence
  Description of Artificial Sequence:  Enzymatic Nucleic Acid
ugaaaucagccgaaaggcgagugaggucuagauagaa

SEQ ID NO: 12484 - RNA, 37 nt, Artificial Sequence
  Description of Artificial Sequence:  Enzymatic Nucleic Acid
aggguccagccgaaaggcgagugaggucuaauugaaa

SEQ ID NO: 12485 - RNA, 37 nt, Artificial Sequence
  Description of Artificial Sequence:  Enzymatic Nucleic Acid
ccgaaauagccgaaaggcgagugaggucuuggagauc

SEQ ID NO: 12486 - RNA, 37 nt, Artificial Sequence
  Description of Artificial Sequence:  Enzymatic Nucleic Acid
cuccuguagccgaaaggcgagugaggucucuaagagg

SEQ ID NO: 12487 - RNA, 37 nt, Artificial Sequence
  Description of Artificial Sequence:  Enzymatic Nucleic Acid
ugcaccgggccgaaaggcgagugaggucuuccuguac

SEQ ID NO: 12488 - RNA, 37 nt, Artificial Sequence
  Description of Artificial Sequence:  Enzymatic Nucleic Acid
uugcugcagccgaaaggcgagugaggucucggcuccu

SEQ ID NO: 12489 - RNA, 37 nt, Artificial Sequence
  Description of Artificial Sequence:  Enzymatic Nucleic Acid
aauugcuggccgaaaggcgagugaggucuaccggcuc

SEQ ID NO: 12490 - RNA, 37 nt, Artificial Sequence
  Description of Artificial Sequence:  Enzymatic Nucleic Acid
uggaauuggccgaaaggcgagugaggucuugcaccgg

SEQ ID NO: 12491 - RNA, 37 nt, Artificial Sequence
  Description of Artificial Sequence:  Enzymatic Nucleic Acid
gucacagagccgaaaggcgagugaggucuuggauucc

SEQ ID NO: 12492 - RNA, 37 nt, Artificial Sequence
  Description of Artificial Sequence:  Enzymatic Nucleic Acid
cacugucagccgaaaggcgagugaggucuagacugga

SEQ ID NO: 12493 - RNA, 37 nt, Artificial Sequence
  Description of Artificial Sequence:  Enzymatic Nucleic Acid
gaaaaacagccgaaaggcgagugaggucuugucacag

SEQ ID NO: 12494 - RNA, 37 nt, Artificial Sequence
  Description of Artificial Sequence:  Enzymatic Nucleic Acid
gugaaaaagccgaaaggcgagugaggucuacugucac

SEQ ID NO: 12495 - RNA, 37 nt, Artificial Sequence
  Description of Artificial Sequence:  Enzymatic Nucleic Acid
gcuuaccagccgaaaggcgagugaggucuagagugaa

SEQ ID NO: 12496 - RNA, 37 nt, Artificial Sequence
  Description of Artificial Sequence:  Enzymatic Nucleic Acid
ucagcuuagccgaaaggcgagugaggucucacagagu

SEQ ID NO: 12497 - RNA, 37 nt, Artificial Sequence
  Description of Artificial Sequence:  Enzymatic Nucleic Acid
uuccucaggccgaaaggcgagugaggucuuuaccaca

SEQ ID NO: 12498 - RNA, 37 nt, Artificial Sequence
  Description of Artificial Sequence:  Enzymatic Nucleic Acid
aaaugugagccgaaaggcgagugaggucuauauuccu

SEQ ID NO: 12499 - RNA, 37 nt, Artificial Sequence
  Description of Artificial Sequence:  Enzymatic Nucleic Acid
uucuuugagccgaaaggcgagugaggucuugaaaaug

SEQ ID NO: 12500 - DNA, 31 bp, Artificial Sequence
  Description of Artificial Sequence:  Enzymatic Nucleic Acid
gaaaatagggctagctacaacgacagaattc

SEQ ID NO: 12501 - DNA, 31 bp, Artificial Sequence
  Description of Artificial Sequence:  Enzymatic Nucleic Acid
gaggaaaaggctagctacaacgaagccagaa

SEQ ID NO: 12502 - DNA, 31 bp, Artificial Sequence
  Description of Artificial Sequence:  Enzymatic Nucleic Acid
cggaacggggctagctacaacgaaggaggaa

SEQ ID NO: 12503 - DNA, 31 bp, Artificial Sequence
  Description of Artificial Sequence:  Enzymatic Nucleic Acid
agtcggaaggctagctacaacgaggcaggag

SEQ ID NO: 12504 - DNA, 31 bp, Artificial Sequence
  Description of Artificial Sequence:  Enzymatic Nucleic Acid
gtgccgagggctagctacaacgacggaacgg

SEQ ID NO: 12505 - DNA, 31 bp, Artificial Sequence
  Description of Artificial Sequence:  Enzymatic Nucleic Acid
ctctggtgggctagctacaacgacgagtcgg

SEQ ID NO: 12506 - DNA, 31 bp, Artificial Sequence
  Description of Artificial Sequence:  Enzymatic Nucleic Acid
gactctggggctagctacaacgagccgagtc

SEQ ID NO: 12507 - DNA, 31 bp, Artificial Sequence
  Description of Artificial Sequence:  Enzymatic Nucleic Acid
gagacagaggctagctacaacgatctggtgc

SEQ ID NO: 12508 - DNA, 31 bp, Artificial Sequence
  Description of Artificial Sequence:  Enzymatic Nucleic Acid
agtagagaggctagctacaacgaagactctg

SEQ ID NO: 12509 - DNA, 31 bp, Artificial Sequence
  Description of Artificial Sequence:  Enzymatic Nucleic Acid
gttctcagggctagctacaacgaagagacag

SEQ ID NO: 12510 - DNA, 31 bp, Artificial Sequence
  Description of Artificial Sequence:  Enzymatic Nucleic Acid
gcgctgcgggctagctacaacgatctcagta

SEQ ID NO: 12511 - DNA, 31 bp, Artificial Sequence
  Description of Artificial Sequence:  Enzymatic Nucleic Acid
acgcgctgggctagctacaacgagttctcag

SEQ ID NO: 12512 - DNA, 31 bp, Artificial Sequence
  Description of Artificial Sequence:  Enzymatic Nucleic Acid
ctgacgcgggctagctacaacgatgcgttct

SEQ ID NO: 12513 - DNA, 31 bp, Artificial Sequence
  Description of Artificial Sequence:  Enzymatic Nucleic Acid
ccctgacgggctagctacaacgagctgcgtt

SEQ ID NO: 12514 - DNA, 31 bp, Artificial Sequence
  Description of Artificial Sequence:  Enzymatic Nucleic Acid
ggccctgaggctagctacaacgagcgctgcg

SEQ ID NO: 12515 - DNA, 31 bp, Artificial Sequence
  Description of Artificial Sequence:  Enzymatic Nucleic Acid
gagctcggggctagctacaacgacctgacgc

SEQ ID NO: 12516 - DNA, 31 bp, Artificial Sequence
  Description of Artificial Sequence:  Enzymatic Nucleic Acid
gtgaagagggctagctacaacgatcggccct

SEQ ID NO: 12517 - DNA, 31 bp, Artificial Sequence
  Description of Artificial Sequence:  Enzymatic Nucleic Acid
caggccagggctagctacaacgagaagagct

SEQ ID NO: 12518 - DNA, 31 bp, Artificial Sequence
  Description of Artificial Sequence:  Enzymatic Nucleic Acid
ggagcaggggctagctacaacgacagtgaag

SEQ ID NO: 12519 - DNA, 31 bp, Artificial Sequence
  Description of Artificial Sequence:  Enzymatic Nucleic Acid
gcgcggagggctagctacaacgaaggccagt

SEQ ID NO: 12520 - DNA, 31 bp, Artificial Sequence
  Description of Artificial Sequence:  Enzymatic Nucleic Acid
gaagagcgggctagctacaacgaggagcagg

SEQ ID NO: 12521 - DNA, 31 bp, Artificial Sequence
  Description of Artificial Sequence:  Enzymatic Nucleic Acid
ttgaagagggctagctacaacgagcggagca

SEQ ID NO: 12522 - DNA, 31 bp, Artificial Sequence
  Description of Artificial Sequence:  Enzymatic Nucleic Acid
cgctggcaggctagctacaacgatgaagagc

SEQ ID NO: 12523 - DNA, 31 bp, Artificial Sequence
  Description of Artificial Sequence:  Enzymatic Nucleic Acid
ggcgctggggctagctacaacgaattgaaga

SEQ ID NO: 12524 - DNA, 31 bp, Artificial Sequence
  Description of Artificial Sequence:  Enzymatic Nucleic Acid
gcctggcgggctagctacaacgatggcattg

SEQ ID NO: 12525 - DNA, 31 bp, Artificial Sequence
  Description of Artificial Sequence:  Enzymatic Nucleic Acid
gcgcctggggctagctacaacgagctggcat

SEQ ID NO: 12526 - DNA, 31 bp, Artificial Sequence
  Description of Artificial Sequence:  Enzymatic Nucleic Acid
ggtgagcgggctagctacaacgactggcgct

SEQ ID NO: 12527 - DNA, 31 bp, Artificial Sequence
  Description of Artificial Sequence:  Enzymatic Nucleic Acid
agggtgagggctagctacaacgagcctggcg

SEQ ID NO: 12528 - DNA, 31 bp, Artificial Sequence
  Description of Artificial Sequence:  Enzymatic Nucleic Acid
ctgcagggggctagctacaacgagagcgcct

SEQ ID NO: 12529 - DNA, 31 bp, Artificial Sequence
  Description of Artificial Sequence:  Enzymatic Nucleic Acid
acgctctgggctagctacaacgaagggtgag

SEQ ID NO: 12530 - DNA, 31 bp, Artificial Sequence
  Description of Artificial Sequence:  Enzymatic Nucleic Acid
gcgggacgggctagctacaacgatctgcagg

SEQ ID NO: 12531 - DNA, 31 bp, Artificial Sequence
  Description of Artificial Sequence:  Enzymatic Nucleic Acid
aggcgggaggctagctacaacgagctctgca

SEQ ID NO: 12532 - DNA, 31 bp, Artificial Sequence
  Description of Artificial Sequence:  Enzymatic Nucleic Acid
ttgagaggggctagctacaacgagggacgct

SEQ ID NO: 12533 - DNA, 31 bp, Artificial Sequence
  Description of Artificial Sequence:  Enzymatic Nucleic Acid
gggtcacaggctagctacaacgaccctcttt

SEQ ID NO: 12534 - DNA, 31 bp, Artificial Sequence
  Description of Artificial Sequence:  Enzymatic Nucleic Acid
gcgggtcaggctagctacaacgaacccctct

SEQ ID NO: 12535 - DNA, 31 bp, Artificial Sequence
  Description of Artificial Sequence:  Enzymatic Nucleic Acid
ctcgcgggggctagctacaacgacacacccc

SEQ ID NO: 12536 - DNA, 31 bp, Artificial Sequence
  Description of Artificial Sequence:  Enzymatic Nucleic Acid
taaactcgggctagctacaacgagggtcaca

SEQ ID NO: 12537 - DNA, 31 bp, Artificial Sequence
  Description of Artificial Sequence:  Enzymatic Nucleic Acid
tatctaaaggctagctacaacgatcgcgggt

SEQ ID NO: 12538 - DNA, 31 bp, Artificial Sequence
  Description of Artificial Sequence:  Enzymatic Nucleic Acid
acctcctaggctagctacaacgactaaactc

SEQ ID NO: 12539 - DNA, 31 bp, Artificial Sequence
  Description of Artificial Sequence:  Enzymatic Nucleic Acid
ggcaggaaggctagctacaacgactcctatc

SEQ ID NO: 12540 - DNA, 31 bp, Artificial Sequence
  Description of Artificial Sequence:  Enzymatic Nucleic Acid
ccccacggggctagctacaacgaaggaacct

SEQ ID NO: 12541 - DNA, 31 bp, Artificial Sequence
  Description of Artificial Sequence:  Enzymatic Nucleic Acid
gttccccaggctagctacaacgaggcaggaa

SEQ ID NO: 12542 - DNA, 31 bp, Artificial Sequence
  Description of Artificial Sequence:  Enzymatic Nucleic Acid
gcggggtgggctagctacaacgatccccacg

SEQ ID NO: 12543 - DNA, 31 bp, Artificial Sequence
  Description of Artificial Sequence:  Enzymatic Nucleic Acid
cggcggggggctagctacaacgagttcccca

SEQ ID NO: 12544 - DNA, 31 bp, Artificial Sequence
  Description of Artificial Sequence:  Enzymatic Nucleic Acid
gagggcggggctagctacaacgaggggtgtt

SEQ ID NO: 12545 - DNA, 31 bp, Artificial Sequence
  Description of Artificial Sequence:  Enzymatic Nucleic Acid
tccgagggggctagctacaacgaggcggggt

SEQ ID NO: 12546 - DNA, 31 bp, Artificial Sequence
  Description of Artificial Sequence:  Enzymatic Nucleic Acid
agaaaaagggctagctacaacgatccgaggg

SEQ ID NO: 12547 - DNA, 31 bp, Artificial Sequence
  Description of Artificial Sequence:  Enzymatic Nucleic Acid
ctgcgccaggctagctacaacgaagaaaaag

SEQ ID NO: 12548 - DNA, 31 bp, Artificial Sequence
  Description of Artificial Sequence:  Enzymatic Nucleic Acid
aagctgcgggctagctacaacgacacagaaa

SEQ ID NO: 12549 - DNA, 31 bp, Artificial Sequence
  Description of Artificial Sequence:  Enzymatic Nucleic Acid
agaagctgggctagctacaacgagccacaga

SEQ ID NO: 12550 - DNA, 31 bp, Artificial Sequence
  Description of Artificial Sequence:  Enzymatic Nucleic Acid
cggagaagggctagctacaacgatgcgccac

SEQ ID NO: 12551 - DNA, 31 bp, Artificial Sequence
  Description of Artificial Sequence:  Enzymatic Nucleic Acid
ggctcgggggctagctacaacgaggagaagc

SEQ ID NO: 12552 - DNA, 31 bp, Artificial Sequence
  Description of Artificial Sequence:  Enzymatic Nucleic Acid
gcgcgcggggctagctacaacgatcgggcgg

SEQ ID NO: 12553 - DNA, 31 bp, Artificial Sequence
  Description of Artificial Sequence:  Enzymatic Nucleic Acid
tccgcgcgggctagctacaacgaggctcggg

SEQ ID NO: 12554 - DNA, 31 bp, Artificial Sequence
  Description of Artificial Sequence:  Enzymatic Nucleic Acid
gctccgcgggctagctacaacgagcggctcg

SEQ ID NO: 12555 - DNA, 31 bp, Artificial Sequence
  Description of Artificial Sequence:  Enzymatic Nucleic Acid
cagctccgggctagctacaacgagcgcggct

SEQ ID NO: 12556 - DNA, 31 bp, Artificial Sequence
  Description of Artificial Sequence:  Enzymatic Nucleic Acid
cccggcagggctagctacaacgatccgcgcg

SEQ ID NO: 12557 - DNA, 31 bp, Artificial Sequence
  Description of Artificial Sequence:  Enzymatic Nucleic Acid
gcccccggggctagctacaacgaagctccgc

SEQ ID NO: 12558 - DNA, 31 bp, Artificial Sequence
  Description of Artificial Sequence:  Enzymatic Nucleic Acid
ctaaggagggctagctacaacgaccccggca

SEQ ID NO: 12559 - DNA, 31 bp, Artificial Sequence
  Description of Artificial Sequence:  Enzymatic Nucleic Acid
cccgggtgggctagctacaacgataaggagc

SEQ ID NO: 12560 - DNA, 31 bp, Artificial Sequence
  Description of Artificial Sequence:  Enzymatic Nucleic Acid
cgcccgggggctagctacaacgagctaagga

SEQ ID NO: 12561 - DNA, 31 bp, Artificial Sequence
  Description of Artificial Sequence:  Enzymatic Nucleic Acid
ccccggcgggctagctacaacgaccgggtgc

SEQ ID NO: 12562 - DNA, 31 bp, Artificial Sequence
  Description of Artificial Sequence:  Enzymatic Nucleic Acid
ggccccggggctagctacaacgagcccgggt

SEQ ID NO: 12563 - DNA, 31 bp, Artificial Sequence
  Description of Artificial Sequence:  Enzymatic Nucleic Acid
ggcgagggggctagctacaacgacccggcgc

SEQ ID NO: 12564 - DNA, 31 bp, Artificial Sequence
  Description of Artificial Sequence:  Enzymatic Nucleic Acid
cggaagggggctagctacaacgagagggccc

SEQ ID NO: 12565 - DNA, 31 bp, Artificial Sequence
  Description of Artificial Sequence:  Enzymatic Nucleic Acid
gaaggctgggctagctacaacgaggaagggc

SEQ ID NO: 12566 - DNA, 31 bp, Artificial Sequence
  Description of Artificial Sequence:  Enzymatic Nucleic Acid
agtgaaggggctagctacaacgatgcggaag

SEQ ID NO: 12567 - DNA, 31 bp, Artificial Sequence
  Description of Artificial Sequence:  Enzymatic Nucleic Acid
ggctggagggctagctacaacgagaaggctg

SEQ ID NO: 12568 - DNA, 31 bp, Artificial Sequence
  Description of Artificial Sequence:  Enzymatic Nucleic Acid
gcagagggggctagctacaacgatggagtga

SEQ ID NO: 12569 - DNA, 31 bp, Artificial Sequence
  Description of Artificial Sequence:  Enzymatic Nucleic Acid
tgcgggagggctagctacaacgaagagggct

SEQ ID NO: 12570 - DNA, 31 bp, Artificial Sequence
  Description of Artificial Sequence:  Enzymatic Nucleic Acid
atggcgtgggctagctacaacgagggagcag

SEQ ID NO: 12571 - DNA, 31 bp, Artificial Sequence
  Description of Artificial Sequence:  Enzymatic Nucleic Acid
tcatggcgggctagctacaacgagcgggagc

SEQ ID NO: 12572 - DNA, 31 bp, Artificial Sequence
  Description of Artificial Sequence:  Enzymatic Nucleic Acid
cttcatggggctagctacaacgagtgcggga

SEQ ID NO: 12573 - DNA, 31 bp, Artificial Sequence
  Description of Artificial Sequence:  Enzymatic Nucleic Acid
cgacttcaggctagctacaacgaggcgtgcg

SEQ ID NO: 12574 - DNA, 31 bp, Artificial Sequence
  Description of Artificial Sequence:  Enzymatic Nucleic Acid
aacggcgaggctagctacaacgattcatggc

SEQ ID NO: 12575 - DNA, 31 bp, Artificial Sequence
  Description of Artificial Sequence:  Enzymatic Nucleic Acid
tagaacggggctagctacaacgagacttcat

SEQ ID NO: 12576 - DNA, 31 bp, Artificial Sequence
  Description of Artificial Sequence:  Enzymatic Nucleic Acid
cggtagaaggctagctacaacgaggcgactt

SEQ ID NO: 12577 - DNA, 31 bp, Artificial Sequence
  Description of Artificial Sequence:  Enzymatic Nucleic Acid
ggcagcggggctagctacaacgaagaacggc

SEQ ID NO: 12578 - DNA, 31 bp, Artificial Sequence
  Description of Artificial Sequence:  Enzymatic Nucleic Acid
tctggcagggctagctacaacgaggtagaac

SEQ ID NO: 12579 - DNA, 31 bp, Artificial Sequence
  Description of Artificial Sequence:  Enzymatic Nucleic Acid
tgttctggggctagctacaacgaagcggtag

SEQ ID NO: 12580 - DNA, 31 bp, Artificial Sequence
  Description of Artificial Sequence:  Enzymatic Nucleic Acid
aggtggtgggctagctacaacgatctggcag

SEQ ID NO: 12581 - DNA, 31 bp, Artificial Sequence
  Description of Artificial Sequence:  Enzymatic Nucleic Acid
agaggtggggctagctacaacgagttctggc

SEQ ID NO: 12582 - DNA, 31 bp, Artificial Sequence
  Description of Artificial Sequence:  Enzymatic Nucleic Acid
cacagaggggctagctacaacgaggtgttct

SEQ ID NO: 12583 - DNA, 31 bp, Artificial Sequence
  Description of Artificial Sequence:  Enzymatic Nucleic Acid
tttttccaggctagctacaacgaagaggtgg

SEQ ID NO: 12584 - DNA, 31 bp, Artificial Sequence
  Description of Artificial Sequence:  Enzymatic Nucleic Acid
ccgagttgggctagctacaacgactttttcc

SEQ ID NO: 12585 - DNA, 31 bp, Artificial Sequence
  Description of Artificial Sequence:  Enzymatic Nucleic Acid
ccgccgagggctagctacaacgatgcctttt

SEQ ID NO: 12586 - DNA, 31 bp, Artificial Sequence
  Description of Artificial Sequence:  Enzymatic Nucleic Acid
catcaccgggctagctacaacgacgagttgc

SEQ ID NO: 12587 - DNA, 31 bp, Artificial Sequence
  Description of Artificial Sequence:  Enzymatic Nucleic Acid
gcccatcaggctagctacaacgacgccgagt

SEQ ID NO: 12588 - DNA, 31 bp, Artificial Sequence
  Description of Artificial Sequence:  Enzymatic Nucleic Acid
cccgcccaggctagctacaacgacaccgccg

SEQ ID NO: 12589 - DNA, 31 bp, Artificial Sequence
  Description of Artificial Sequence:  Enzymatic Nucleic Acid
gcaccccgggctagctacaacgaccatcacc

SEQ ID NO: 12590 - DNA, 31 bp, Artificial Sequence
  Description of Artificial Sequence:  Enzymatic Nucleic Acid
gaagagcaggctagctacaacgacccgccca

SEQ ID NO: 12591 - DNA, 31 bp, Artificial Sequence
  Description of Artificial Sequence:  Enzymatic Nucleic Acid
ctgaagagggctagctacaacgaaccccgcc

SEQ ID NO: 12592 - DNA, 31 bp, Artificial Sequence
  Description of Artificial Sequence:  Enzymatic Nucleic Acid
ggccggtgggctagctacaacgatgaagagc

SEQ ID NO: 12593 - DNA, 31 bp, Artificial Sequence
  Description of Artificial Sequence:  Enzymatic Nucleic Acid
gaggccggggctagctacaacgagctgaaga

SEQ ID NO: 12594 - DNA, 31 bp, Artificial Sequence
  Description of Artificial Sequence:  Enzymatic Nucleic Acid
ccaggaggggctagctacaacgacggtgctg

SEQ ID NO: 12595 - DNA, 31 bp, Artificial Sequence
  Description of Artificial Sequence:  Enzymatic Nucleic Acid
gcaggttgggctagctacaacgaccaggagg

SEQ ID NO: 12596 - DNA, 31 bp, Artificial Sequence
  Description of Artificial Sequence:  Enzymatic Nucleic Acid
ccagcaggggctagctacaacgatgcccagg

SEQ ID NO: 12597 - DNA, 31 bp, Artificial Sequence
  Description of Artificial Sequence:  Enzymatic Nucleic Acid
agggccagggctagctacaacgaaggttgcc

SEQ ID NO: 12598 - DNA, 31 bp, Artificial Sequence
  Description of Artificial Sequence:  Enzymatic Nucleic Acid
ccccagggggctagctacaacgacagcaggt

SEQ ID NO: 12599 - DNA, 31 bp, Artificial Sequence
  Description of Artificial Sequence:  Enzymatic Nucleic Acid
gccagcagggctagctacaacgacccagggc

SEQ ID NO: 12600 - DNA, 31 bp, Artificial Sequence
  Description of Artificial Sequence:  Enzymatic Nucleic Acid
cgcgccagggctagctacaacgaagccccag

SEQ ID NO: 12601 - DNA, 31 bp, Artificial Sequence
  Description of Artificial Sequence:  Enzymatic Nucleic Acid
cgagcgcgggctagctacaacgacagcagcc

SEQ ID NO: 12602 - DNA, 31 bp, Artificial Sequence
  Description of Artificial Sequence:  Enzymatic Nucleic Acid
cccgagcgggctagctacaacgagccagcag

SEQ ID NO: 12603 - DNA, 31 bp, Artificial Sequence
  Description of Artificial Sequence:  Enzymatic Nucleic Acid
gccccgagggctagctacaacgagcgccagc

SEQ ID NO: 12604 - DNA, 31 bp, Artificial Sequence
  Description of Artificial Sequence:  Enzymatic Nucleic Acid
caccccagggctagctacaacgacccgagcg

SEQ ID NO: 12605 - DNA, 31 bp, Artificial Sequence
  Description of Artificial Sequence:  Enzymatic Nucleic Acid
gagcaccaggctagctacaacgacccagccc

SEQ ID NO: 12606 - DNA, 31 bp, Artificial Sequence
  Description of Artificial Sequence:  Enzymatic Nucleic Acid
cgcgagcaggctagctacaacgacaccccag

SEQ ID NO: 12607 - DNA, 31 bp, Artificial Sequence
  Description of Artificial Sequence:  Enzymatic Nucleic Acid
gccgcgagggctagctacaacgaaccacccc

SEQ ID NO: 12608 - DNA, 31 bp, Artificial Sequence
  Description of Artificial Sequence:  Enzymatic Nucleic Acid
ggacgccgggctagctacaacgagagcacca

SEQ ID NO: 12609 - DNA, 31 bp, Artificial Sequence
  Description of Artificial Sequence:  Enzymatic Nucleic Acid
agtggacgggctagctacaacgacgcgagca

SEQ ID NO: 12610 - DNA, 31 bp, Artificial Sequence
  Description of Artificial Sequence:  Enzymatic Nucleic Acid
gcagtggaggctagctacaacgagccgcgag

SEQ ID NO: 12611 - DNA, 31 bp, Artificial Sequence
  Description of Artificial Sequence:  Enzymatic Nucleic Acid
gggcgcagggctagctacaacgaggacgccg

SEQ ID NO: 12612 - DNA, 31 bp, Artificial Sequence
  Description of Artificial Sequence:  Enzymatic Nucleic Acid
agcgggcgggctagctacaacgaagtggacg

SEQ ID NO: 12613 - DNA, 31 bp, Artificial Sequence
  Description of Artificial Sequence:  Enzymatic Nucleic Acid
gcagcgggggctagctacaacgagcagtgga

SEQ ID NO: 12614 - DNA, 31 bp, Artificial Sequence
  Description of Artificial Sequence:  Enzymatic Nucleic Acid
gagggcagggctagctacaacgagggcgcag

SEQ ID NO: 12615 - DNA, 31 bp, Artificial Sequence
  Description of Artificial Sequence:  Enzymatic Nucleic Acid
accgagggggctagctacaacgaagcgggcg

SEQ ID NO: 12616 - DNA, 31 bp, Artificial Sequence
  Description of Artificial Sequence:  Enzymatic Nucleic Acid
gtagaagaggctagctacaacgacgagggca

SEQ ID NO: 12617 - DNA, 31 bp, Artificial Sequence
  Description of Artificial Sequence:  Enzymatic Nucleic Acid
ccagcatgggctagctacaacgaagaagacc

SEQ ID NO: 12618 - DNA, 31 bp, Artificial Sequence
  Description of Artificial Sequence:  Enzymatic Nucleic Acid
caccagcaggctagctacaacgagtagaaga

SEQ ID NO: 12619 - DNA, 31 bp, Artificial Sequence
  Description of Artificial Sequence:  Enzymatic Nucleic Acid
cacaccagggctagctacaacgaatgtagaa

SEQ ID NO: 12620 - DNA, 31 bp, Artificial Sequence
  Description of Artificial Sequence:  Enzymatic Nucleic Acid
gccacacaggctagctacaacgacagcatgt

SEQ ID NO: 12621 - DNA, 31 bp, Artificial Sequence
  Description of Artificial Sequence:  Enzymatic Nucleic Acid
aggccacaggctagctacaacgaaccagcat

SEQ ID NO: 12622 - DNA, 31 bp, Artificial Sequence
  Description of Artificial Sequence:  Enzymatic Nucleic Acid
tcaggccaggctagctacaacgaacaccagc

SEQ ID NO: 12623 - DNA, 31 bp, Artificial Sequence
  Description of Artificial Sequence:  Enzymatic Nucleic Acid
ccgtcaggggctagctacaacgacacacacc

SEQ ID NO: 12624 - DNA, 31 bp, Artificial Sequence
  Description of Artificial Sequence:  Enzymatic Nucleic Acid
ggtgaccgggctagctacaacgacaggccac

SEQ ID NO: 12625 - DNA, 31 bp, Artificial Sequence
  Description of Artificial Sequence:  Enzymatic Nucleic Acid
gtcggtgaggctagctacaacgacgtcaggc

SEQ ID NO: 12626 - DNA, 31 bp, Artificial Sequence
  Description of Artificial Sequence:  Enzymatic Nucleic Acid
caagtcggggctagctacaacgagaccgtca

SEQ ID NO: 12627 - DNA, 31 bp, Artificial Sequence
  Description of Artificial Sequence:  Enzymatic Nucleic Acid
ccagcaagggctagctacaacgacggtgacc

SEQ ID NO: 12628 - DNA, 31 bp, Artificial Sequence
  Description of Artificial Sequence:  Enzymatic Nucleic Acid
ttgcccagggctagctacaacgaaagtcggt

SEQ ID NO: 12629 - DNA, 31 bp, Artificial Sequence
  Description of Artificial Sequence:  Enzymatic Nucleic Acid
ggcacttgggctagctacaacgaccagcaag

SEQ ID NO: 12630 - DNA, 31 bp, Artificial Sequence
  Description of Artificial Sequence:  Enzymatic Nucleic Acid
aggaggcaggctagctacaacgattgcccag

SEQ ID NO: 12631 - DNA, 31 bp, Artificial Sequence
  Description of Artificial Sequence:  Enzymatic Nucleic Acid
ttaggaggggctagctacaacgaacttgccc

SEQ ID NO: 12632 - DNA, 31 bp, Artificial Sequence
  Description of Artificial Sequence:  Enzymatic Nucleic Acid
ccaccgggggctagctacaacgattaggagg

SEQ ID NO: 12633 - DNA, 31 bp, Artificial Sequence
  Description of Artificial Sequence:  Enzymatic Nucleic Acid
cagcaccaggctagctacaacgacgggctta

SEQ ID NO: 12634 - DNA, 31 bp, Artificial Sequence
  Description of Artificial Sequence:  Enzymatic Nucleic Acid
agccagcaggctagctacaacgacaccgggc

SEQ ID NO: 12635 - DNA, 31 bp, Artificial Sequence
  Description of Artificial Sequence:  Enzymatic Nucleic Acid
gcagccagggctagctacaacgaaccaccgg

SEQ ID NO: 12636 - DNA, 31 bp, Artificial Sequence
  Description of Artificial Sequence:  Enzymatic Nucleic Acid
gtaggcagggctagctacaacgacagcacca

SEQ ID NO: 12637 - DNA, 31 bp, Artificial Sequence
  Description of Artificial Sequence:  Enzymatic Nucleic Acid
agcgtaggggctagctacaacgaagccagca

SEQ ID NO: 12638 - DNA, 31 bp, Artificial Sequence
  Description of Artificial Sequence:  Enzymatic Nucleic Acid
tctgagcgggctagctacaacgaaggcagcc

SEQ ID NO: 12639 - DNA, 31 bp, Artificial Sequence
  Description of Artificial Sequence:  Enzymatic Nucleic Acid
gttctgagggctagctacaacgagtaggcag

SEQ ID NO: 12640 - DNA, 31 bp, Artificial Sequence
  Description of Artificial Sequence:  Enzymatic Nucleic Acid
gactccggggctagctacaacgatctgagcg

SEQ ID NO: 12641 - DNA, 31 bp, Artificial Sequence
  Description of Artificial Sequence:  Enzymatic Nucleic Acid
cccgcagaggctagctacaacgatccggttc

SEQ ID NO: 12642 - DNA, 31 bp, Artificial Sequence
  Description of Artificial Sequence:  Enzymatic Nucleic Acid
agcacccgggctagctacaacgaagactccg

SEQ ID NO: 12643 - DNA, 31 bp, Artificial Sequence
  Description of Artificial Sequence:  Enzymatic Nucleic Acid
cgcaagcaggctagctacaacgaccgcagac

SEQ ID NO: 12644 - DNA, 31 bp, Artificial Sequence
  Description of Artificial Sequence:  Enzymatic Nucleic Acid
ggcgcaagggctagctacaacgaacccgcag

SEQ ID NO: 12645 - DNA, 31 bp, Artificial Sequence
  Description of Artificial Sequence:  Enzymatic Nucleic Acid
tgcgggcgggctagctacaacgaaagcaccc

SEQ ID NO: 12646 - DNA, 31 bp, Artificial Sequence
  Description of Artificial Sequence:  Enzymatic Nucleic Acid
aatgcgggggctagctacaacgagcaagcac

SEQ ID NO: 12647 - DNA, 31 bp, Artificial Sequence
  Description of Artificial Sequence:  Enzymatic Nucleic Acid
gtccaatgggctagctacaacgagggcgcaa

SEQ ID NO: 12648 - DNA, 31 bp, Artificial Sequence
  Description of Artificial Sequence:  Enzymatic Nucleic Acid
ttgtccaaggctagctacaacgagcgggcgc

SEQ ID NO: 12649 - DNA, 31 bp, Artificial Sequence
  Description of Artificial Sequence:  Enzymatic Nucleic Acid
acgagttgggctagctacaacgaccaatgcg

SEQ ID NO: 12650 - DNA, 31 bp, Artificial Sequence
  Description of Artificial Sequence:  Enzymatic Nucleic Acid
acaacgagggctagctacaacgatgtccaat

SEQ ID NO: 12651 - DNA, 31 bp, Artificial Sequence
  Description of Artificial Sequence:  Enzymatic Nucleic Acid
tggcacaaggctagctacaacgagagttgtc

SEQ ID NO: 12652 - DNA, 31 bp, Artificial Sequence
  Description of Artificial Sequence:  Enzymatic Nucleic Acid
gcttggcaggctagctacaacgaaacgagtt

SEQ ID NO: 12653 - DNA, 31 bp, Artificial Sequence
  Description of Artificial Sequence:  Enzymatic Nucleic Acid
aggcttggggctagctacaacgaacaacgag

SEQ ID NO: 12654 - DNA, 31 bp, Artificial Sequence
  Description of Artificial Sequence:  Enzymatic Nucleic Acid
ggcgaaggggctagctacaacgattggcaca

SEQ ID NO: 12655 - DNA, 31 bp, Artificial Sequence
  Description of Artificial Sequence:  Enzymatic Nucleic Acid
gaagaaggggctagctacaacgagaaggctt

SEQ ID NO: 12656 - DNA, 31 bp, Artificial Sequence
  Description of Artificial Sequence:  Enzymatic Nucleic Acid
gaaggacaggctagctacaacgagaagaagg

SEQ ID NO: 12657 - DNA, 31 bp, Artificial Sequence
  Description of Artificial Sequence:  Enzymatic Nucleic Acid
aagaaggaggctagctacaacgaatgaagaa

SEQ ID NO: 12658 - DNA, 31 bp, Artificial Sequence
  Description of Artificial Sequence:  Enzymatic Nucleic Acid
gaggagagggctagctacaacgaccaaagaa

SEQ ID NO: 12659 - DNA, 31 bp, Artificial Sequence
  Description of Artificial Sequence:  Enzymatic Nucleic Acid
ttgcagtgggctagctacaacgacgaggaga

SEQ ID NO: 12660 - DNA, 31 bp, Artificial Sequence
  Description of Artificial Sequence:  Enzymatic Nucleic Acid
agttgcagggctagctacaacgagtcgagga

SEQ ID NO: 12661 - DNA, 31 bp, Artificial Sequence
  Description of Artificial Sequence:  Enzymatic Nucleic Acid
aggagttgggctagctacaacgaagtgtcga

SEQ ID NO: 12662 - DNA, 31 bp, Artificial Sequence
  Description of Artificial Sequence:  Enzymatic Nucleic Acid
gccaggagggctagctacaacgatgcagtgt

SEQ ID NO: 12663 - DNA, 31 bp, Artificial Sequence
  Description of Artificial Sequence:  Enzymatic Nucleic Acid
tgccatggggctagctacaacgacaggagtt

SEQ ID NO: 12664 - DNA, 31 bp, Artificial Sequence
  Description of Artificial Sequence:  Enzymatic Nucleic Acid
cagtgccaggctagctacaacgaggccagga

SEQ ID NO: 12665 - DNA, 31 bp, Artificial Sequence
  Description of Artificial Sequence:  Enzymatic Nucleic Acid
ctccagtgggctagctacaacgacatggcca

SEQ ID NO: 12666 - DNA, 31 bp, Artificial Sequence
  Description of Artificial Sequence:  Enzymatic Nucleic Acid
cactccagggctagctacaacgagccatggc

SEQ ID NO: 12667 - DNA, 31 bp, Artificial Sequence
  Description of Artificial Sequence:  Enzymatic Nucleic Acid
agccagcaggctagctacaacgatccagtgc

SEQ ID NO: 12668 - DNA, 31 bp, Artificial Sequence
  Description of Artificial Sequence:  Enzymatic Nucleic Acid
agagccagggctagctacaacgaactccagt

SEQ ID NO: 12669 - DNA, 31 bp, Artificial Sequence
  Description of Artificial Sequence:  Enzymatic Nucleic Acid
agggagagggctagctacaacgacagcactc

SEQ ID NO: 12670 - DNA, 31 bp, Artificial Sequence
  Description of Artificial Sequence:  Enzymatic Nucleic Acid
aaagggtgggctagctacaacgacctaggga

SEQ ID NO: 12671 - DNA, 31 bp, Artificial Sequence
  Description of Artificial Sequence:  Enzymatic Nucleic Acid
agaaagggggctagctacaacgagccctagg

SEQ ID NO: 12672 - DNA, 31 bp, Artificial Sequence
  Description of Artificial Sequence:  Enzymatic Nucleic Acid
gccgtcggggctagctacaacgaagaagaaa

SEQ ID NO: 12673 - DNA, 31 bp, Artificial Sequence
  Description of Artificial Sequence:  Enzymatic Nucleic Acid
atgtgccgggctagctacaacgacggtagaa

SEQ ID NO: 12674 - DNA, 31 bp, Artificial Sequence
  Description of Artificial Sequence:  Enzymatic Nucleic Acid
gtgatgtgggctagctacaacgacgtcggta

SEQ ID NO: 12675 - DNA, 31 bp, Artificial Sequence
  Description of Artificial Sequence:  Enzymatic Nucleic Acid
gggtgatgggctagctacaacgagccgtcgg

SEQ ID NO: 12676 - DNA, 31 bp, Artificial Sequence
  Description of Artificial Sequence:  Enzymatic Nucleic Acid
cagggtgaggctagctacaacgagtgccgtc

SEQ ID NO: 12677 - DNA, 31 bp, Artificial Sequence
  Description of Artificial Sequence:  Enzymatic Nucleic Acid
gcgcagggggctagctacaacgagatgtgcc

SEQ ID NO: 12678 - DNA, 31 bp, Artificial Sequence
  Description of Artificial Sequence:  Enzymatic Nucleic Acid
cccaggcgggctagctacaacgaagggtgat

SEQ ID NO: 12679 - DNA, 31 bp, Artificial Sequence
  Description of Artificial Sequence:  Enzymatic Nucleic Acid
cgcccaggggctagctacaacgagcagggtg

SEQ ID NO: 12680 - DNA, 31 bp, Artificial Sequence
  Description of Artificial Sequence:  Enzymatic Nucleic Acid
ccagtgcgggctagctacaacgaccaggcgc

SEQ ID NO: 12681 - DNA, 31 bp, Artificial Sequence
  Description of Artificial Sequence:  Enzymatic Nucleic Acid
caccagtgggctagctacaacgagcccaggc

SEQ ID NO: 12682 - DNA, 31 bp, Artificial Sequence
  Description of Artificial Sequence:  Enzymatic Nucleic Acid
gccaccagggctagctacaacgagcgcccag

SEQ ID NO: 12683 - DNA, 31 bp, Artificial Sequence
  Description of Artificial Sequence:  Enzymatic Nucleic Acid
cggggccaggctagctacaacgacagtgcgc

SEQ ID NO: 12684 - DNA, 31 bp, Artificial Sequence
  Description of Artificial Sequence:  Enzymatic Nucleic Acid
caccggggggctagctacaacgacaccagtg

SEQ ID NO: 12685 - DNA, 31 bp, Artificial Sequence
  Description of Artificial Sequence:  Enzymatic Nucleic Acid
gctcaccaggctagctacaacgacggggcca

SEQ ID NO: 12686 - DNA, 31 bp, Artificial Sequence
  Description of Artificial Sequence:  Enzymatic Nucleic Acid
ggcgctcaggctagctacaacgacaccgggg

SEQ ID NO: 12687 - DNA, 31 bp, Artificial Sequence
  Description of Artificial Sequence:  Enzymatic Nucleic Acid
agaaggcgggctagctacaacgatcaccacc

SEQ ID NO: 12688 - DNA, 31 bp, Artificial Sequence
  Description of Artificial Sequence:  Enzymatic Nucleic Acid
ggagaaggggctagctacaacgagctcacca

SEQ ID NO: 12689 - DNA, 31 bp, Artificial Sequence
  Description of Artificial Sequence:  Enzymatic Nucleic Acid
gcagaaagggctagctacaacgacagggaga

SEQ ID NO: 12690 - DNA, 31 bp, Artificial Sequence
  Description of Artificial Sequence:  Enzymatic Nucleic Acid
gtagcgcgggctagctacaacgaagaaagcc

SEQ ID NO: 12691 - DNA, 31 bp, Artificial Sequence
  Description of Artificial Sequence:  Enzymatic Nucleic Acid
aggtagcgggctagctacaacgagcagaaag

SEQ ID NO: 12692 - DNA, 31 bp, Artificial Sequence
  Description of Artificial Sequence:  Enzymatic Nucleic Acid
aaaggtagggctagctacaacgagcgcagaa

SEQ ID NO: 12693 - DNA, 31 bp, Artificial Sequence
  Description of Artificial Sequence:  Enzymatic Nucleic Acid
atgaaaggggctagctacaacgaagcgcgca

SEQ ID NO: 12694 - DNA, 31 bp, Artificial Sequence
  Description of Artificial Sequence:  Enzymatic Nucleic Acid
gaagcccaggctagctacaacgagaaaggta

SEQ ID NO: 12695 - DNA, 31 bp, Artificial Sequence
  Description of Artificial Sequence:  Enzymatic Nucleic Acid
tcccgaagggctagctacaacgaccatgaaa

SEQ ID NO: 12696 - DNA, 31 bp, Artificial Sequence
  Description of Artificial Sequence:  Enzymatic Nucleic Acid
tgcacgaaggctagctacaacgattcccgaa

SEQ ID NO: 12697 - DNA, 31 bp, Artificial Sequence
  Description of Artificial Sequence:  Enzymatic Nucleic Acid
gtactgcaggctagctacaacgagaacttcc

SEQ ID NO: 12698 - DNA, 31 bp, Artificial Sequence
  Description of Artificial Sequence:  Enzymatic Nucleic Acid
cagtactgggctagctacaacgaacgaactt

SEQ ID NO: 12699 - DNA, 31 bp, Artificial Sequence
  Description of Artificial Sequence:  Enzymatic Nucleic Acid
gggcagtaggctagctacaacgatgcacgaa

SEQ ID NO: 12700 - DNA, 31 bp, Artificial Sequence
  Description of Artificial Sequence:  Enzymatic Nucleic Acid
cggggcagggctagctacaacgaactgcacg

SEQ ID NO: 12701 - DNA, 31 bp, Artificial Sequence
  Description of Artificial Sequence:  Enzymatic Nucleic Acid
tgccggggggctagctacaacgaagtactgc

SEQ ID NO: 12702 - DNA, 31 bp, Artificial Sequence
  Description of Artificial Sequence:  Enzymatic Nucleic Acid
accaggtgggctagctacaacgacggggcag

SEQ ID NO: 12703 - DNA, 31 bp, Artificial Sequence
  Description of Artificial Sequence:  Enzymatic Nucleic Acid
gcaccaggggctagctacaacgagccggggc

SEQ ID NO: 12704 - DNA, 31 bp, Artificial Sequence
  Description of Artificial Sequence:  Enzymatic Nucleic Acid
ataaagcaggctagctacaacgacaggtgcc

SEQ ID NO: 12705 - DNA, 31 bp, Artificial Sequence
  Description of Artificial Sequence:  Enzymatic Nucleic Acid
ggataaagggctagctacaacgaaccaggtg

SEQ ID NO: 12706 - DNA, 31 bp, Artificial Sequence
  Description of Artificial Sequence:  Enzymatic Nucleic Acid
catctggaggctagctacaacgaaaagcacc

SEQ ID NO: 12707 - DNA, 31 bp, Artificial Sequence
  Description of Artificial Sequence:  Enzymatic Nucleic Acid
gtggaccaggctagctacaacgactggataa

SEQ ID NO: 12708 - DNA, 31 bp, Artificial Sequence
  Description of Artificial Sequence:  Enzymatic Nucleic Acid
ctcgtggaggctagctacaacgacatctgga

SEQ ID NO: 12709 - DNA, 31 bp, Artificial Sequence
  Description of Artificial Sequence:  Enzymatic Nucleic Acid
cctcctcgggctagctacaacgaggaccatc

SEQ ID NO: 12710 - DNA, 31 bp, Artificial Sequence
  Description of Artificial Sequence:  Enzymatic Nucleic Acid
acagcgagggctagctacaacgacctcctcg

SEQ ID NO: 12711 - DNA, 31 bp, Artificial Sequence
  Description of Artificial Sequence:  Enzymatic Nucleic Acid
accgacagggctagctacaacgagagccctc

SEQ ID NO: 12712 - DNA, 31 bp, Artificial Sequence
  Description of Artificial Sequence:  Enzymatic Nucleic Acid
agcaccgaggctagctacaacgaagcgagcc

SEQ ID NO: 12713 - DNA, 31 bp, Artificial Sequence
  Description of Artificial Sequence:  Enzymatic Nucleic Acid
ccccagcaggctagctacaacgacgacagcg

SEQ ID NO: 12714 - DNA, 31 bp, Artificial Sequence
  Description of Artificial Sequence:  Enzymatic Nucleic Acid
taccccagggctagctacaacgaaccgacag

SEQ ID NO: 12715 - DNA, 31 bp, Artificial Sequence
  Description of Artificial Sequence:  Enzymatic Nucleic Acid
acagagtaggctagctacaacgacccagcac

SEQ ID NO: 12716 - DNA, 31 bp, Artificial Sequence
  Description of Artificial Sequence:  Enzymatic Nucleic Acid
gcacagagggctagctacaacgaaccccagc

SEQ ID NO: 12717 - DNA, 31 bp, Artificial Sequence
  Description of Artificial Sequence:  Enzymatic Nucleic Acid
gtagagcaggctagctacaacgaagagtacc

SEQ ID NO: 12718 - DNA, 31 bp, Artificial Sequence
  Description of Artificial Sequence:  Enzymatic Nucleic Acid
gagtagagggctagctacaacgaacagagta

SEQ ID NO: 12719 - DNA, 31 bp, Artificial Sequence
  Description of Artificial Sequence:  Enzymatic Nucleic Acid
ggctggagggctagctacaacgaagagcaca

SEQ ID NO: 12720 - DNA, 31 bp, Artificial Sequence
  Description of Artificial Sequence:  Enzymatic Nucleic Acid
ccatgaggggctagctacaacgatggagtag

SEQ ID NO: 12721 - DNA, 31 bp, Artificial Sequence
  Description of Artificial Sequence:  Enzymatic Nucleic Acid
cagcgccaggctagctacaacgagaggctgg

SEQ ID NO: 12722 - DNA, 31 bp, Artificial Sequence
  Description of Artificial Sequence:  Enzymatic Nucleic Acid
cagcagcgggctagctacaacgacatgaggc

SEQ ID NO: 12723 - DNA, 31 bp, Artificial Sequence
  Description of Artificial Sequence:  Enzymatic Nucleic Acid
accagcagggctagctacaacgagccatgag

SEQ ID NO: 12724 - DNA, 31 bp, Artificial Sequence
  Description of Artificial Sequence:  Enzymatic Nucleic Acid
aggaccagggctagctacaacgaagcgccat

SEQ ID NO: 12725 - DNA, 31 bp, Artificial Sequence
  Description of Artificial Sequence:  Enzymatic Nucleic Acid
ggcgaggaggctagctacaacgacagcagcg

SEQ ID NO: 12726 - DNA, 31 bp, Artificial Sequence
  Description of Artificial Sequence:  Enzymatic Nucleic Acid
cacggtggggctagctacaacgagaggacca

SEQ ID NO: 12727 - DNA, 31 bp, Artificial Sequence
  Description of Artificial Sequence:  Enzymatic Nucleic Acid
cagcacggggctagctacaacgaggcgagga

SEQ ID NO: 12728 - DNA, 31 bp, Artificial Sequence
  Description of Artificial Sequence:  Enzymatic Nucleic Acid
gcacagcaggctagctacaacgaggtggcga

SEQ ID NO: 12729 - DNA, 31 bp, Artificial Sequence
  Description of Artificial Sequence:  Enzymatic Nucleic Acid
ttgcacagggctagctacaacgaacggtggc

SEQ ID NO: 12730 - DNA, 31 bp, Artificial Sequence
  Description of Artificial Sequence:  Enzymatic Nucleic Acid
aggttgcaggctagctacaacgaagcacggt

SEQ ID NO: 12731 - DNA, 31 bp, Artificial Sequence
  Description of Artificial Sequence:  Enzymatic Nucleic Acid
cgaggttgggctagctacaacgaacagcacg

SEQ ID NO: 12732 - DNA, 31 bp, Artificial Sequence
  Description of Artificial Sequence:  Enzymatic Nucleic Acid
cgccgaggggctagctacaacgatgcacagc

SEQ ID NO: 12733 - DNA, 31 bp, Artificial Sequence
  Description of Artificial Sequence:  Enzymatic Nucleic Acid
gcatggcgggctagctacaacgacgaggttg

SEQ ID NO: 12734 - DNA, 31 bp, Artificial Sequence
  Description of Artificial Sequence:  Enzymatic Nucleic Acid
gcgcatggggctagctacaacgagccgaggt

SEQ ID NO: 12735 - DNA, 31 bp, Artificial Sequence
  Description of Artificial Sequence:  Enzymatic Nucleic Acid
gttgcgcaggctagctacaacgaggcgccga

SEQ ID NO: 12736 - DNA, 31 bp, Artificial Sequence
  Description of Artificial Sequence:  Enzymatic Nucleic Acid
aggttgcgggctagctacaacgaatggcgcc

SEQ ID NO: 12737 - DNA, 31 bp, Artificial Sequence
  Description of Artificial Sequence:  Enzymatic Nucleic Acid
agaggttgggctagctacaacgagcatggcg

SEQ ID NO: 12738 - DNA, 31 bp, Artificial Sequence
  Description of Artificial Sequence:  Enzymatic Nucleic Acid
catagaggggctagctacaacgatgcgcatg

SEQ ID NO: 12739 - DNA, 31 bp, Artificial Sequence
  Description of Artificial Sequence:  Enzymatic Nucleic Acid
gcatcgcaggctagctacaacgaagaggttg

SEQ ID NO: 12740 - DNA, 31 bp, Artificial Sequence
  Description of Artificial Sequence:  Enzymatic Nucleic Acid
gtgcatcgggctagctacaacgaatagaggt

SEQ ID NO: 12741 - DNA, 31 bp, Artificial Sequence
  Description of Artificial Sequence:  Enzymatic Nucleic Acid
ccggtgcaggctagctacaacgacgcataga

SEQ ID NO: 12742 - DNA, 31 bp, Artificial Sequence
  Description of Artificial Sequence:  Enzymatic Nucleic Acid
cgccggtgggctagctacaacgaatcgcata

SEQ ID NO: 12743 - DNA, 31 bp, Artificial Sequence
  Description of Artificial Sequence:  Enzymatic Nucleic Acid
gccgccggggctagctacaacgagcatcgca

SEQ ID NO: 12744 - DNA, 31 bp, Artificial Sequence
  Description of Artificial Sequence:  Enzymatic Nucleic Acid
tgcagccgggctagctacaacgacggtgcat

SEQ ID NO: 12745 - DNA, 31 bp, Artificial Sequence
  Description of Artificial Sequence:  Enzymatic Nucleic Acid
cgctgcagggctagctacaacgacgccggtg

SEQ ID NO: 12746 - DNA, 31 bp, Artificial Sequence
  Description of Artificial Sequence:  Enzymatic Nucleic Acid
tgccgctgggctagctacaacgaagccgccg

SEQ ID NO: 12747 - DNA, 31 bp, Artificial Sequence
  Description of Artificial Sequence:  Enzymatic Nucleic Acid
gggtgccgggctagctacaacgatgcagccg

SEQ ID NO: 12748 - DNA, 31 bp, Artificial Sequence
  Description of Artificial Sequence:  Enzymatic Nucleic Acid
cgcgggtgggctagctacaacgacgctgcag

SEQ ID NO: 12749 - DNA, 31 bp, Artificial Sequence
  Description of Artificial Sequence:  Enzymatic Nucleic Acid
agcgcgggggctagctacaacgagccgctgc

SEQ ID NO: 12750 - DNA, 31 bp, Artificial Sequence
  Description of Artificial Sequence:  Enzymatic Nucleic Acid
caggagcgggctagctacaacgagggtgccg

SEQ ID NO: 12751 - DNA, 31 bp, Artificial Sequence
  Description of Artificial Sequence:  Enzymatic Nucleic Acid
tgcaggagggctagctacaacgagcgggtgc

SEQ ID NO: 12752 - DNA, 31 bp, Artificial Sequence
  Description of Artificial Sequence:  Enzymatic Nucleic Acid
ccctggtgggctagctacaacgaaggagcgc

SEQ ID NO: 12753 - DNA, 31 bp, Artificial Sequence
  Description of Artificial Sequence:  Enzymatic Nucleic Acid
gtccctggggctagctacaacgagcaggagc

SEQ ID NO: 12754 - DNA, 31 bp, Artificial Sequence
  Description of Artificial Sequence:  Enzymatic Nucleic Acid
cggcacagggctagctacaacgaccctggtg

SEQ ID NO: 12755 - DNA, 31 bp, Artificial Sequence
  Description of Artificial Sequence:  Enzymatic Nucleic Acid
gctcggcaggctagctacaacgaagtccctg

SEQ ID NO: 12756 - DNA, 31 bp, Artificial Sequence
  Description of Artificial Sequence:  Enzymatic Nucleic Acid
cggctcggggctagctacaacgaacagtccc

SEQ ID NO: 12757 - DNA, 31 bp, Artificial Sequence
  Description of Artificial Sequence:  Enzymatic Nucleic Acid
gcgcgcggggctagctacaacgatcggcaca

SEQ ID NO: 12758 - DNA, 31 bp, Artificial Sequence
  Description of Artificial Sequence:  Enzymatic Nucleic Acid
tccgcgcgggctagctacaacgaggctcggc

SEQ ID NO: 12759 - DNA, 31 bp, Artificial Sequence
  Description of Artificial Sequence:  Enzymatic Nucleic Acid
cgtccgcgggctagctacaacgagcggctcg

SEQ ID NO: 12760 - DNA, 31 bp, Artificial Sequence
  Description of Artificial Sequence:  Enzymatic Nucleic Acid
cccgtccgggctagctacaacgagcgcggct

SEQ ID NO: 12761 - DNA, 31 bp, Artificial Sequence
  Description of Artificial Sequence:  Enzymatic Nucleic Acid
ccctcccgggctagctacaacgaccgcgcgc

SEQ ID NO: 12762 - DNA, 31 bp, Artificial Sequence
  Description of Artificial Sequence:  Enzymatic Nucleic Acid
aggggacgggctagctacaacgattccctcc

SEQ ID NO: 12763 - DNA, 31 bp, Artificial Sequence
  Description of Artificial Sequence:  Enzymatic Nucleic Acid
tgaggggaggctagctacaacgagcttccct

SEQ ID NO: 12764 - DNA, 31 bp, Artificial Sequence
  Description of Artificial Sequence:  Enzymatic Nucleic Acid
tccaggggggctagctacaacgatgagggga

SEQ ID NO: 12765 - DNA, 31 bp, Artificial Sequence
  Description of Artificial Sequence:  Enzymatic Nucleic Acid
tgatccagggctagctacaacgatcctccag

SEQ ID NO: 12766 - DNA, 31 bp, Artificial Sequence
  Description of Artificial Sequence:  Enzymatic Nucleic Acid
ggaggtgaggctagctacaacgaccagctcc

SEQ ID NO: 12767 - DNA, 31 bp, Artificial Sequence
  Description of Artificial Sequence:  Enzymatic Nucleic Acid
gcaggaggggctagctacaacgagatccagc

SEQ ID NO: 12768 - DNA, 31 bp, Artificial Sequence
  Description of Artificial Sequence:  Enzymatic Nucleic Acid
gccagcagggctagctacaacgaaggaggtg

SEQ ID NO: 12769 - DNA, 31 bp, Artificial Sequence
  Description of Artificial Sequence:  Enzymatic Nucleic Acid
agcgccagggctagctacaacgaagcaggag

SEQ ID NO: 12770 - DNA, 31 bp, Artificial Sequence
  Description of Artificial Sequence:  Enzymatic Nucleic Acid
catcagcgggctagctacaacgacagcagca

SEQ ID NO: 12771 - DNA, 31 bp, Artificial Sequence
  Description of Artificial Sequence:  Enzymatic Nucleic Acid
gtcatcagggctagctacaacgagccagcag

SEQ ID NO: 12772 - DNA, 31 bp, Artificial Sequence
  Description of Artificial Sequence:  Enzymatic Nucleic Acid
cacggtcaggctagctacaacgacagcgcca

SEQ ID NO: 12773 - DNA, 31 bp, Artificial Sequence
  Description of Artificial Sequence:  Enzymatic Nucleic Acid
gagcacggggctagctacaacgacatcagcg

SEQ ID NO: 12774 - DNA, 31 bp, Artificial Sequence
  Description of Artificial Sequence:  Enzymatic Nucleic Acid
gaagagcaggctagctacaacgaggtcatca

SEQ ID NO: 12775 - DNA, 31 bp, Artificial Sequence
  Description of Artificial Sequence:  Enzymatic Nucleic Acid
gtgaagagggctagctacaacgaacggtcat

SEQ ID NO: 12776 - DNA, 31 bp, Artificial Sequence
  Description of Artificial Sequence:  Enzymatic Nucleic Acid
acacatagggctagctacaacgagaagagca

SEQ ID NO: 12777 - DNA, 31 bp, Artificial Sequence
  Description of Artificial Sequence:  Enzymatic Nucleic Acid
agaacacaggctagctacaacgaagtgaaga

SEQ ID NO: 12778 - DNA, 31 bp, Artificial Sequence
  Description of Artificial Sequence:  Enzymatic Nucleic Acid
agagaacaggctagctacaacgaatagtgaa

SEQ ID NO: 12779 - DNA, 31 bp, Artificial Sequence
  Description of Artificial Sequence:  Enzymatic Nucleic Acid
gcagagaaggctagctacaacgaacatagtg

SEQ ID NO: 12780 - DNA, 31 bp, Artificial Sequence
  Description of Artificial Sequence:  Enzymatic Nucleic Acid
attacgggggctagctacaacgaagagaaca

SEQ ID NO: 12781 - DNA, 31 bp, Artificial Sequence
  Description of Artificial Sequence:  Enzymatic Nucleic Acid
ataaattaggctagctacaacgagggcagag

SEQ ID NO: 12782 - DNA, 31 bp, Artificial Sequence
  Description of Artificial Sequence:  Enzymatic Nucleic Acid
gcgataaaggctagctacaacgatacgggca

SEQ ID NO: 12783 - DNA, 31 bp, Artificial Sequence
  Description of Artificial Sequence:  Enzymatic Nucleic Acid
aagcgcgaggctagctacaacgaaaattacg

SEQ ID NO: 12784 - DNA, 31 bp, Artificial Sequence
  Description of Artificial Sequence:  Enzymatic Nucleic Acid
agtaagcgggctagctacaacgagataaatt

SEQ ID NO: 12785 - DNA, 31 bp, Artificial Sequence
  Description of Artificial Sequence:  Enzymatic Nucleic Acid
atagtaagggctagctacaacgagcgataaa

SEQ ID NO: 12786 - DNA, 31 bp, Artificial Sequence
  Description of Artificial Sequence:  Enzymatic Nucleic Acid
ctccatagggctagctacaacgaaagcgcga

SEQ ID NO: 12787 - DNA, 31 bp, Artificial Sequence
  Description of Artificial Sequence:  Enzymatic Nucleic Acid
atgctccaggctagctacaacgaagtaagcg

SEQ ID NO: 12788 - DNA, 31 bp, Artificial Sequence
  Description of Artificial Sequence:  Enzymatic Nucleic Acid
cttaaatgggctagctacaacgatccatagt

SEQ ID NO: 12789 - DNA, 31 bp, Artificial Sequence
  Description of Artificial Sequence:  Enzymatic Nucleic Acid
tccttaaaggctagctacaacgagctccata

SEQ ID NO: 12790 - DNA, 31 bp, Artificial Sequence
  Description of Artificial Sequence:  Enzymatic Nucleic Acid
ccttgacaggctagctacaacgaccttaaat

SEQ ID NO: 12791 - DNA, 31 bp, Artificial Sequence
  Description of Artificial Sequence:  Enzymatic Nucleic Acid
ctccttgaggctagctacaacgaatccttaa

SEQ ID NO: 12792 - DNA, 31 bp, Artificial Sequence
  Description of Artificial Sequence:  Enzymatic Nucleic Acid
aggtcctgggctagctacaacgattttctcc

SEQ ID NO: 12793 - DNA, 31 bp, Artificial Sequence
  Description of Artificial Sequence:  Enzymatic Nucleic Acid
ttcagaggggctagctacaacgacctgtttt

SEQ ID NO: 12794 - DNA, 31 bp, Artificial Sequence
  Description of Artificial Sequence:  Enzymatic Nucleic Acid
gtcttctgggctagctacaacgattcttcag

SEQ ID NO: 12795 - DNA, 31 bp, Artificial Sequence
  Description of Artificial Sequence:  Enzymatic Nucleic Acid
ctcggaggggctagctacaacgacttctgct

SEQ ID NO: 12796 - DNA, 31 bp, Artificial Sequence
  Description of Artificial Sequence:  Enzymatic Nucleic Acid
tcgcaaggggctagctacaacgatcggaggt

SEQ ID NO: 12797 - DNA, 31 bp, Artificial Sequence
  Description of Artificial Sequence:  Enzymatic Nucleic Acid
agaaatcgggctagctacaacgaaaggctcg

SEQ ID NO: 12798 - DNA, 31 bp, Artificial Sequence
  Description of Artificial Sequence:  Enzymatic Nucleic Acid
gatagaaaggctagctacaacgacgcaaggc

SEQ ID NO: 12799 - DNA, 31 bp, Artificial Sequence
  Description of Artificial Sequence:  Enzymatic Nucleic Acid
atcacagaggctagctacaacgaagaaatcg

SEQ ID NO: 12800 - DNA, 31 bp, Artificial Sequence
  Description of Artificial Sequence:  Enzymatic Nucleic Acid
tgaaatcaggctagctacaacgaagatagaa

SEQ ID NO: 12801 - DNA, 31 bp, Artificial Sequence
  Description of Artificial Sequence:  Enzymatic Nucleic Acid
aattgaaaggctagctacaacgacacagata

SEQ ID NO: 12802 - DNA, 31 bp, Artificial Sequence
  Description of Artificial Sequence:  Enzymatic Nucleic Acid
gtccacaaggctagctacaacgatgaaatca

SEQ ID NO: 12803 - DNA, 31 bp, Artificial Sequence
  Description of Artificial Sequence:  Enzymatic Nucleic Acid
agggtccaggctagctacaacgaaattgaaa

SEQ ID NO: 12804 - DNA, 31 bp, Artificial Sequence
  Description of Artificial Sequence:  Enzymatic Nucleic Acid
tccaagggggctagctacaacgaccacaatt

SEQ ID NO: 12805 - DNA, 31 bp, Artificial Sequence
  Description of Artificial Sequence:  Enzymatic Nucleic Acid
gataaaaaggctagctacaacgaccaagggt

SEQ ID NO: 12806 - DNA, 31 bp, Artificial Sequence
  Description of Artificial Sequence:  Enzymatic Nucleic Acid
gaaaatgaggctagctacaacgaaaaaatcc

SEQ ID NO: 12807 - DNA, 31 bp, Artificial Sequence
  Description of Artificial Sequence:  Enzymatic Nucleic Acid
tctgaaaaggctagctacaacgagataaaaa

SEQ ID NO: 12808 - DNA, 31 bp, Artificial Sequence
  Description of Artificial Sequence:  Enzymatic Nucleic Acid
actggagaggctagctacaacgactgaaaat

SEQ ID NO: 12809 - DNA, 31 bp, Artificial Sequence
  Description of Artificial Sequence:  Enzymatic Nucleic Acid
ccgaaataggctagctacaacgatggagatc

SEQ ID NO: 12810 - DNA, 31 bp, Artificial Sequence
  Description of Artificial Sequence:  Enzymatic Nucleic Acid
atccgaaaggctagctacaacgaactggaga

SEQ ID NO: 12811 - DNA, 31 bp, Artificial Sequence
  Description of Artificial Sequence:  Enzymatic Nucleic Acid
aaaaaataggctagctacaacgaccgaaata

SEQ ID NO: 12812 - DNA, 31 bp, Artificial Sequence
  Description of Artificial Sequence:  Enzymatic Nucleic Acid
tgaaaaaaggctagctacaacgaatccgaaa

SEQ ID NO: 12813 - DNA, 31 bp, Artificial Sequence
  Description of Artificial Sequence:  Enzymatic Nucleic Acid
aaatcttgggctagctacaacgagaaaaaat

SEQ ID NO: 12814 - DNA, 31 bp, Artificial Sequence
  Description of Artificial Sequence:  Enzymatic Nucleic Acid
aatgaaaaggctagctacaacgacttgtgaa

SEQ ID NO: 12815 - DNA, 31 bp, Artificial Sequence
  Description of Artificial Sequence:  Enzymatic Nucleic Acid
aggtctaaggctagctacaacgagaaaatct

SEQ ID NO: 12816 - DNA, 31 bp, Artificial Sequence
  Description of Artificial Sequence:  Enzymatic Nucleic Acid
ctaagaggggctagctacaacgactaatgaa

SEQ ID NO: 12817 - DNA, 31 bp, Artificial Sequence
  Description of Artificial Sequence:  Enzymatic Nucleic Acid
ctcctgtaggctagctacaacgactaagagg

SEQ ID NO: 12818 - DNA, 31 bp, Artificial Sequence
  Description of Artificial Sequence:  Enzymatic Nucleic Acid
ggctcctgggctagctacaacgaacctaaga

SEQ ID NO: 12819 - DNA, 31 bp, Artificial Sequence
  Description of Artificial Sequence:  Enzymatic Nucleic Acid
tgcaccggggctagctacaacgatcctgtac

SEQ ID NO: 12820 - DNA, 31 bp, Artificial Sequence
  Description of Artificial Sequence:  Enzymatic Nucleic Acid
ttgctgcaggctagctacaacgacggctcct

SEQ ID NO: 12821 - DNA, 31 bp, Artificial Sequence
  Description of Artificial Sequence:  Enzymatic Nucleic Acid
aattgctgggctagctacaacgaaccggctc

SEQ ID NO: 12822 - DNA, 31 bp, Artificial Sequence
  Description of Artificial Sequence:  Enzymatic Nucleic Acid
tggaattgggctagctacaacgatgcaccgg

SEQ ID NO: 12823 - DNA, 31 bp, Artificial Sequence
  Description of Artificial Sequence:  Enzymatic Nucleic Acid
tagtggaaggctagctacaacgatgctgcac

SEQ ID NO: 12824 - DNA, 31 bp, Artificial Sequence
  Description of Artificial Sequence:  Enzymatic Nucleic Acid
catgttagggctagctacaacgaggaattgc

SEQ ID NO: 12825 - DNA, 31 bp, Artificial Sequence
  Description of Artificial Sequence:  Enzymatic Nucleic Acid
attccatgggctagctacaacgatagtggaa

SEQ ID NO: 12826 - DNA, 31 bp, Artificial Sequence
  Description of Artificial Sequence:  Enzymatic Nucleic Acid
ggattccaggctagctacaacgagttagtgg

SEQ ID NO: 12827 - DNA, 31 bp, Artificial Sequence
  Description of Artificial Sequence:  Enzymatic Nucleic Acid
agactggaggctagctacaacgatccatgtt

SEQ ID NO: 12828 - DNA, 31 bp, Artificial Sequence
  Description of Artificial Sequence:  Enzymatic Nucleic Acid
gtcacagaggctagctacaacgatggattcc

SEQ ID NO: 12829 - DNA, 31 bp, Artificial Sequence
  Description of Artificial Sequence:  Enzymatic Nucleic Acid
cactgtcaggctagctacaacgaagactgga

SEQ ID NO: 12830 - DNA, 31 bp, Artificial Sequence
  Description of Artificial Sequence:  Enzymatic Nucleic Acid
aaacactgggctagctacaacgacacagact

SEQ ID NO: 12831 - DNA, 31 bp, Artificial Sequence
  Description of Artificial Sequence:  Enzymatic Nucleic Acid
gaaaaacaggctagctacaacgatgtcacag

SEQ ID NO: 12832 - DNA, 31 bp, Artificial Sequence
  Description of Artificial Sequence:  Enzymatic Nucleic Acid
gtgaaaaaggctagctacaacgaactgtcac

SEQ ID NO: 12833 - DNA, 31 bp, Artificial Sequence
  Description of Artificial Sequence:  Enzymatic Nucleic Acid
ccacagagggctagctacaacgagaaaaaca

SEQ ID NO: 12834 - DNA, 31 bp, Artificial Sequence
  Description of Artificial Sequence:  Enzymatic Nucleic Acid
gcttaccaggctagctacaacgaagagtgaa

SEQ ID NO: 12835 - DNA, 31 bp, Artificial Sequence
  Description of Artificial Sequence:  Enzymatic Nucleic Acid
tcagcttaggctagctacaacgacacagagt

SEQ ID NO: 12836 - DNA, 31 bp, Artificial Sequence
  Description of Artificial Sequence:  Enzymatic Nucleic Acid
ttcctcagggctagctacaacgattaccaca

SEQ ID NO: 12837 - DNA, 31 bp, Artificial Sequence
  Description of Artificial Sequence:  Enzymatic Nucleic Acid
gtgacataggctagctacaacgatcctcagc

SEQ ID NO: 12838 - DNA, 31 bp, Artificial Sequence
  Description of Artificial Sequence:  Enzymatic Nucleic Acid
atgtgacaggctagctacaacgaattcctca

SEQ ID NO: 12839 - DNA, 31 bp, Artificial Sequence
  Description of Artificial Sequence:  Enzymatic Nucleic Acid
aaatgtgaggctagctacaacgaatattcct

SEQ ID NO: 12840 - DNA, 31 bp, Artificial Sequence
  Description of Artificial Sequence:  Enzymatic Nucleic Acid
tgaaaatgggctagctacaacgagacatatt

SEQ ID NO: 12841 - DNA, 31 bp, Artificial Sequence
  Description of Artificial Sequence:  Enzymatic Nucleic Acid
actgaaaaggctagctacaacgagtgacata

SEQ ID NO: 12842 - DNA, 31 bp, Artificial Sequence
  Description of Artificial Sequence:  Enzymatic Nucleic Acid
ttctttgaggctagctacaacgatgaaaatg

SEQ ID NO: 12843 - RNA, 48 nt, Artificial Sequence
  Description of Artificial Sequence:  Enzymatic Nucleic Acid
gaaaauagggaggaaacucccuucaaggacaucguccgggcagaauuc

SEQ ID NO: 12844 - RNA, 48 nt, Artificial Sequence
  Description of Artificial Sequence:  Enzymatic Nucleic Acid
cggaacggggaggaaacucccuucaaggacaucguccgggaggaggaa

SEQ ID NO: 12845 - RNA, 48 nt, Artificial Sequence
  Description of Artificial Sequence:  Enzymatic Nucleic Acid
agucggaaggaggaaacucccuucaaggacaucguccgggggcaggag

SEQ ID NO: 12846 - RNA, 48 nt, Artificial Sequence
  Description of Artificial Sequence:  Enzymatic Nucleic Acid
ugccgaguggaggaaacucccuucaaggacaucguccgggggaacggc

SEQ ID NO: 12847 - RNA, 48 nt, Artificial Sequence
  Description of Artificial Sequence:  Enzymatic Nucleic Acid
ucuggugcggaggaaacucccuucaaggacaucguccggggagucgga

SEQ ID NO: 12848 - RNA, 48 nt, Artificial Sequence
  Description of Artificial Sequence:  Enzymatic Nucleic Acid
cucuggugggaggaaacucccuucaaggacaucguccgggcgagucgg

SEQ ID NO: 12849 - RNA, 48 nt, Artificial Sequence
  Description of Artificial Sequence:  Enzymatic Nucleic Acid
gacagacuggaggaaacucccuucaaggacaucguccggguggugccg

SEQ ID NO: 12850 - RNA, 48 nt, Artificial Sequence
  Description of Artificial Sequence:  Enzymatic Nucleic Acid
gagacagaggaggaaacucccuucaaggacaucguccgggucuggugc

SEQ ID NO: 12851 - RNA, 48 nt, Artificial Sequence
  Description of Artificial Sequence:  Enzymatic Nucleic Acid
aguagagaggaggaaacucccuucaaggacaucguccgggagacucug

SEQ ID NO: 12852 - RNA, 48 nt, Artificial Sequence
  Description of Artificial Sequence:  Enzymatic Nucleic Acid
ugcguucuggaggaaacucccuucaaggacaucguccgggaguagaga

SEQ ID NO: 12853 - RNA, 48 nt, Artificial Sequence
  Description of Artificial Sequence:  Enzymatic Nucleic Acid
gcugcguuggaggaaacucccuucaaggacaucguccgggucaguaga

SEQ ID NO: 12854 - RNA, 48 nt, Artificial Sequence
  Description of Artificial Sequence:  Enzymatic Nucleic Acid
acgcgcugggaggaaacucccuucaaggacaucguccgggguucucag

SEQ ID NO: 12855 - RNA, 48 nt, Artificial Sequence
  Description of Artificial Sequence:  Enzymatic Nucleic Acid
cugacgcgggaggaaacucccuucaaggacaucguccgggugcguucu

SEQ ID NO: 12856 - RNA, 48 nt, Artificial Sequence
  Description of Artificial Sequence:  Enzymatic Nucleic Acid
cccugacgggaggaaacucccuucaaggacaucguccggggcugcguu

SEQ ID NO: 12857 - RNA, 48 nt, Artificial Sequence
  Description of Artificial Sequence:  Enzymatic Nucleic Acid
ggcccugaggaggaaacucccuucaaggacaucguccggggcgcugcg

SEQ ID NO: 12858 - RNA, 48 nt, Artificial Sequence
  Description of Artificial Sequence:  Enzymatic Nucleic Acid
gcucggccggaggaaacucccuucaaggacaucguccgggugacgcgc

SEQ ID NO: 12859 - RNA, 48 nt, Artificial Sequence
  Description of Artificial Sequence:  Enzymatic Nucleic Acid
agcucggcggaggaaacucccuucaaggacaucguccgggcugacgcg

SEQ ID NO: 12860 - RNA, 48 nt, Artificial Sequence
  Description of Artificial Sequence:  Enzymatic Nucleic Acid
gagcucggggaggaaacucccuucaaggacaucguccgggccugacgc

SEQ ID NO: 12861 - RNA, 48 nt, Artificial Sequence
  Description of Artificial Sequence:  Enzymatic Nucleic Acid
gaagagcuggaggaaacucccuucaaggacaucguccgggggcccuga

SEQ ID NO: 12862 - RNA, 48 nt, Artificial Sequence
  Description of Artificial Sequence:  Enzymatic Nucleic Acid
gugaagagggaggaaacucccuucaaggacaucguccgggucggcccu

SEQ ID NO: 12863 - RNA, 48 nt, Artificial Sequence
  Description of Artificial Sequence:  Enzymatic Nucleic Acid
gagcaggcggaggaaacucccuucaaggacaucguccgggagugaaga

SEQ ID NO: 12864 - RNA, 48 nt, Artificial Sequence
  Description of Artificial Sequence:  Enzymatic Nucleic Acid
ggagcaggggaggaaacucccuucaaggacaucguccgggcagugaag

SEQ ID NO: 12865 - RNA, 48 nt, Artificial Sequence
  Description of Artificial Sequence:  Enzymatic Nucleic Acid
gcgcggagggaggaaacucccuucaaggacaucguccgggaggccagu

SEQ ID NO: 12866 - RNA, 48 nt, Artificial Sequence
  Description of Artificial Sequence:  Enzymatic Nucleic Acid
gaagagcgggaggaaacucccuucaaggacaucguccgggggagcagg

SEQ ID NO: 12867 - RNA, 48 nt, Artificial Sequence
  Description of Artificial Sequence:  Enzymatic Nucleic Acid
uugaagagggaggaaacucccuucaaggacaucguccggggcggagca

SEQ ID NO: 12868 - RNA, 48 nt, Artificial Sequence
  Description of Artificial Sequence:  Enzymatic Nucleic Acid
ggcgcuggggaggaaacucccuucaaggacaucguccgggauugaaga

SEQ ID NO: 12869 - RNA, 48 nt, Artificial Sequence
  Description of Artificial Sequence:  Enzymatic Nucleic Acid
gccuggcgggaggaaacucccuucaaggacaucguccggguggcauug

SEQ ID NO: 12870 - RNA, 48 nt, Artificial Sequence
  Description of Artificial Sequence:  Enzymatic Nucleic Acid
gcgccuggggaggaaacucccuucaaggacaucguccggggcuggcau

SEQ ID NO: 12871 - RNA, 48 nt, Artificial Sequence
  Description of Artificial Sequence:  Enzymatic Nucleic Acid
gugagcgcggaggaaacucccuucaaggacaucguccggguggcgcug

SEQ ID NO: 12872 - RNA, 48 nt, Artificial Sequence
  Description of Artificial Sequence:  Enzymatic Nucleic Acid
ggugagcgggaggaaacucccuucaaggacaucguccgggcuggcgcu

SEQ ID NO: 12873 - RNA, 48 nt, Artificial Sequence
  Description of Artificial Sequence:  Enzymatic Nucleic Acid
agggugagggaggaaacucccuucaaggacaucguccggggccuggcg

SEQ ID NO: 12874 - RNA, 48 nt, Artificial Sequence
  Description of Artificial Sequence:  Enzymatic Nucleic Acid
acgcucugggaggaaacucccuucaaggacaucguccgggagggugag

SEQ ID NO: 12875 - RNA, 48 nt, Artificial Sequence
  Description of Artificial Sequence:  Enzymatic Nucleic Acid
gggacgcuggaggaaacucccuucaaggacaucguccgggugcagggu

SEQ ID NO: 12876 - RNA, 48 nt, Artificial Sequence
  Description of Artificial Sequence:  Enzymatic Nucleic Acid
gcgggacgggaggaaacucccuucaaggacaucguccgggucugcagg

SEQ ID NO: 12877 - RNA, 48 nt, Artificial Sequence
  Description of Artificial Sequence:  Enzymatic Nucleic Acid
aggcgggaggaggaaacucccuucaaggacaucguccggggcucugca

SEQ ID NO: 12878 - RNA, 48 nt, Artificial Sequence
  Description of Artificial Sequence:  Enzymatic Nucleic Acid
uugagaggggaggaaacucccuucaaggacaucguccggggggacgcu

SEQ ID NO: 12879 - RNA, 48 nt, Artificial Sequence
  Description of Artificial Sequence:  Enzymatic Nucleic Acid
acaccccuggaggaaacucccuucaaggacaucguccggguuugagag

SEQ ID NO: 12880 - RNA, 48 nt, Artificial Sequence
  Description of Artificial Sequence:  Enzymatic Nucleic Acid
ucacacccggaggaaacucccuucaaggacaucguccgggucuuugag

SEQ ID NO: 12881 - RNA, 48 nt, Artificial Sequence
  Description of Artificial Sequence:  Enzymatic Nucleic Acid
gucacaccggaggaaacucccuucaaggacaucguccgggcucuuuga

SEQ ID NO: 12882 - RNA, 48 nt, Artificial Sequence
  Description of Artificial Sequence:  Enzymatic Nucleic Acid
ggucacacggaggaaacucccuucaaggacaucguccgggccucuuug

SEQ ID NO: 12883 - RNA, 48 nt, Artificial Sequence
  Description of Artificial Sequence:  Enzymatic Nucleic Acid
gggucacaggaggaaacucccuucaaggacaucguccgggcccucuuu

SEQ ID NO: 12884 - RNA, 48 nt, Artificial Sequence
  Description of Artificial Sequence:  Enzymatic Nucleic Acid
gcgggucaggaggaaacucccuucaaggacaucguccgggaccccucu

SEQ ID NO: 12885 - RNA, 48 nt, Artificial Sequence
  Description of Artificial Sequence:  Enzymatic Nucleic Acid
ucgcggguggaggaaacucccuucaaggacaucguccgggacaccccu

SEQ ID NO: 12886 - RNA, 48 nt, Artificial Sequence
  Description of Artificial Sequence:  Enzymatic Nucleic Acid
uaaacucgggaggaaacucccuucaaggacaucguccggggggucaca

SEQ ID NO: 12887 - RNA, 48 nt, Artificial Sequence
  Description of Artificial Sequence:  Enzymatic Nucleic Acid
ucuaaacuggaggaaacucccuucaaggacaucguccggggcggguca

SEQ ID NO: 12888 - RNA, 48 nt, Artificial Sequence
  Description of Artificial Sequence:  Enzymatic Nucleic Acid
uaucuaaaggaggaaacucccuucaaggacaucguccgggucgcgggu

SEQ ID NO: 12889 - RNA, 48 nt, Artificial Sequence
  Description of Artificial Sequence:  Enzymatic Nucleic Acid
ccuccuauggaggaaacucccuucaaggacaucguccggguaaacucg

SEQ ID NO: 12890 - RNA, 48 nt, Artificial Sequence
  Description of Artificial Sequence:  Enzymatic Nucleic Acid
ggaaccucggaggaaacucccuucaaggacaucguccggguaucuaaa

SEQ ID NO: 12891 - RNA, 48 nt, Artificial Sequence
  Description of Artificial Sequence:  Enzymatic Nucleic Acid
aggaaccuggaggaaacucccuucaaggacaucguccgggcuaucuaa

SEQ ID NO: 12892 - RNA, 48 nt, Artificial Sequence
  Description of Artificial Sequence:  Enzymatic Nucleic Acid
gcaggaacggaggaaacucccuucaaggacaucguccggguccuaucu

SEQ ID NO: 12893 - RNA, 48 nt, Artificial Sequence
  Description of Artificial Sequence:  Enzymatic Nucleic Acid
ggcaggaaggaggaaacucccuucaaggacaucguccgggcuccuauc

SEQ ID NO: 12894 - RNA, 48 nt, Artificial Sequence
  Description of Artificial Sequence:  Enzymatic Nucleic Acid
ccccacggggaggaaacucccuucaaggacaucguccgggaggaaccu

SEQ ID NO: 12895 - RNA, 48 nt, Artificial Sequence
  Description of Artificial Sequence:  Enzymatic Nucleic Acid
guuccccaggaggaaacucccuucaaggacaucguccgggggcaggaa

SEQ ID NO: 12896 - RNA, 48 nt, Artificial Sequence
  Description of Artificial Sequence:  Enzymatic Nucleic Acid
guguucccggaggaaacucccuucaaggacaucguccgggacggcagg

SEQ ID NO: 12897 - RNA, 48 nt, Artificial Sequence
  Description of Artificial Sequence:  Enzymatic Nucleic Acid
gguguuccggaggaaacucccuucaaggacaucguccgggcacggcag

SEQ ID NO: 12898 - RNA, 48 nt, Artificial Sequence
  Description of Artificial Sequence:  Enzymatic Nucleic Acid
ggguguucggaggaaacucccuucaaggacaucguccgggccacggca

SEQ ID NO: 12899 - RNA, 48 nt, Artificial Sequence
  Description of Artificial Sequence:  Enzymatic Nucleic Acid
gggguguuggaggaaacucccuucaaggacaucguccgggcccacggc

SEQ ID NO: 12900 - RNA, 48 nt, Artificial Sequence
  Description of Artificial Sequence:  Enzymatic Nucleic Acid
gagggcggggaggaaacucccuucaaggacaucguccggggggguguu

SEQ ID NO: 12901 - RNA, 48 nt, Artificial Sequence
  Description of Artificial Sequence:  Enzymatic Nucleic Acid
uccgagggggaggaaacucccuucaaggacaucguccgggggcggggu

SEQ ID NO: 12902 - RNA, 48 nt, Artificial Sequence
  Description of Artificial Sequence:  Enzymatic Nucleic Acid
aaaagcucggaggaaacucccuucaaggacaucguccggggagggcgg

SEQ ID NO: 12903 - RNA, 48 nt, Artificial Sequence
  Description of Artificial Sequence:  Enzymatic Nucleic Acid
aaaaagcuggaggaaacucccuucaaggacaucguccgggcgagggcg

SEQ ID NO: 12904 - RNA, 48 nt, Artificial Sequence
  Description of Artificial Sequence:  Enzymatic Nucleic Acid
agaaaaagggaggaaacucccuucaaggacaucguccggguccgaggg

SEQ ID NO: 12905 - RNA, 48 nt, Artificial Sequence
  Description of Artificial Sequence:  Enzymatic Nucleic Acid
cugcgccaggaggaaacucccuucaaggacaucguccgggagaaaaag

SEQ ID NO: 12906 - RNA, 48 nt, Artificial Sequence
  Description of Artificial Sequence:  Enzymatic Nucleic Acid
agcugcgcggaggaaacucccuucaaggacaucguccgggacagaaaa

SEQ ID NO: 12907 - RNA, 48 nt, Artificial Sequence
  Description of Artificial Sequence:  Enzymatic Nucleic Acid
aagcugcgggaggaaacucccuucaaggacaucguccgggcacagaaa

SEQ ID NO: 12908 - RNA, 48 nt, Artificial Sequence
  Description of Artificial Sequence:  Enzymatic Nucleic Acid
agaagcugggaggaaacucccuucaaggacaucguccggggccacaga

SEQ ID NO: 12909 - RNA, 48 nt, Artificial Sequence
  Description of Artificial Sequence:  Enzymatic Nucleic Acid
cggagaagggaggaaacucccuucaaggacaucguccgggugcgccac

SEQ ID NO: 12910 - RNA, 48 nt, Artificial Sequence
  Description of Artificial Sequence:  Enzymatic Nucleic Acid
ggcucgggggaggaaacucccuucaaggacaucguccgggggagaagc

SEQ ID NO: 12911 - RNA, 48 nt, Artificial Sequence
  Description of Artificial Sequence:  Enzymatic Nucleic Acid
gcgcggcuggaggaaacucccuucaaggacaucguccggggggcggag

SEQ ID NO: 12912 - RNA, 48 nt, Artificial Sequence
  Description of Artificial Sequence:  Enzymatic Nucleic Acid
gcgcgcggggaggaaacucccuucaaggacaucguccgggucgggcgg

SEQ ID NO: 12913 - RNA, 48 nt, Artificial Sequence
  Description of Artificial Sequence:  Enzymatic Nucleic Acid
uccgcgcgggaggaaacucccuucaaggacaucguccgggggcucggg

SEQ ID NO: 12914 - RNA, 48 nt, Artificial Sequence
  Description of Artificial Sequence:  Enzymatic Nucleic Acid
gcuccgcgggaggaaacucccuucaaggacaucguccggggcggcucg

SEQ ID NO: 12915 - RNA, 48 nt, Artificial Sequence
  Description of Artificial Sequence:  Enzymatic Nucleic Acid
cagcuccgggaggaaacucccuucaaggacaucguccggggcgcggcu

SEQ ID NO: 12916 - RNA, 48 nt, Artificial Sequence
  Description of Artificial Sequence:  Enzymatic Nucleic Acid
ggcagcucggaggaaacucccuucaaggacaucguccggggcgcgcgg

SEQ ID NO: 12917 - RNA, 48 nt, Artificial Sequence
  Description of Artificial Sequence:  Enzymatic Nucleic Acid
cggcagcuggaggaaacucccuucaaggacaucguccgggcgcgcgcg

SEQ ID NO: 12918 - RNA, 48 nt, Artificial Sequence
  Description of Artificial Sequence:  Enzymatic Nucleic Acid
cccggcagggaggaaacucccuucaaggacaucguccggguccgcgcg

SEQ ID NO: 12919 - RNA, 48 nt, Artificial Sequence
  Description of Artificial Sequence:  Enzymatic Nucleic Acid
gcccccggggaggaaacucccuucaaggacaucguccgggagcuccgc

SEQ ID NO: 12920 - RNA, 48 nt, Artificial Sequence
  Description of Artificial Sequence:  Enzymatic Nucleic Acid
ggagccccggaggaaacucccuucaaggacaucguccgggggcagcuc

SEQ ID NO: 12921 - RNA, 48 nt, Artificial Sequence
  Description of Artificial Sequence:  Enzymatic Nucleic Acid
aggagcccggaggaaacucccuucaaggacaucguccgggcggcagcu

SEQ ID NO: 12922 - RNA, 48 nt, Artificial Sequence
  Description of Artificial Sequence:  Enzymatic Nucleic Acid
aaggagccggaggaaacucccuucaaggacaucguccgggccggcagc

SEQ ID NO: 12923 - RNA, 48 nt, Artificial Sequence
  Description of Artificial Sequence:  Enzymatic Nucleic Acid
uaaggagcggaggaaacucccuucaaggacaucguccgggcccggcag

SEQ ID NO: 12924 - RNA, 48 nt, Artificial Sequence
  Description of Artificial Sequence:  Enzymatic Nucleic Acid
cuaaggagggaggaaacucccuucaaggacaucguccgggccccggca

SEQ ID NO: 12925 - RNA, 48 nt, Artificial Sequence
  Description of Artificial Sequence:  Enzymatic Nucleic Acid
cccgggugggaggaaacucccuucaaggacaucguccggguaaggagc

SEQ ID NO: 12926 - RNA, 48 nt, Artificial Sequence
  Description of Artificial Sequence:  Enzymatic Nucleic Acid
ccggcgccggaggaaacucccuucaaggacaucguccggggggugcua

SEQ ID NO: 12927 - RNA, 48 nt, Artificial Sequence
  Description of Artificial Sequence:  Enzymatic Nucleic Acid
cccggcgcggaggaaacucccuucaaggacaucguccgggcgggugcu

SEQ ID NO: 12928 - RNA, 48 nt, Artificial Sequence
  Description of Artificial Sequence:  Enzymatic Nucleic Acid
ccccggcgggaggaaacucccuucaaggacaucguccgggccgggugc

SEQ ID NO: 12929 - RNA, 48 nt, Artificial Sequence
  Description of Artificial Sequence:  Enzymatic Nucleic Acid
ggccccggggaggaaacucccuucaaggacaucguccggggcccgggu

SEQ ID NO: 12930 - RNA, 48 nt, Artificial Sequence
  Description of Artificial Sequence:  Enzymatic Nucleic Acid
gagggcccggaggaaacucccuucaaggacaucguccgggggcgcccg

SEQ ID NO: 12931 - RNA, 48 nt, Artificial Sequence
  Description of Artificial Sequence:  Enzymatic Nucleic Acid
cgagggccggaggaaacucccuucaaggacaucguccgggcggcgccc

SEQ ID NO: 12932 - RNA, 48 nt, Artificial Sequence
  Description of Artificial Sequence:  Enzymatic Nucleic Acid
gcgagggcggaggaaacucccuucaaggacaucguccgggccggcgcc

SEQ ID NO: 12933 - RNA, 48 nt, Artificial Sequence
  Description of Artificial Sequence:  Enzymatic Nucleic Acid
ggcgagggggaggaaacucccuucaaggacaucguccgggcccggcgc

SEQ ID NO: 12934 - RNA, 48 nt, Artificial Sequence
  Description of Artificial Sequence:  Enzymatic Nucleic Acid
cggaagggggaggaaacucccuucaaggacaucguccggggagggccc

SEQ ID NO: 12935 - RNA, 48 nt, Artificial Sequence
  Description of Artificial Sequence:  Enzymatic Nucleic Acid
gaaggcugggaggaaacucccuucaaggacaucguccgggggaagggc

SEQ ID NO: 12936 - RNA, 48 nt, Artificial Sequence
  Description of Artificial Sequence:  Enzymatic Nucleic Acid
agugaaggggaggaaacucccuucaaggacaucguccgggugcggaag

SEQ ID NO: 12937 - RNA, 48 nt, Artificial Sequence
  Description of Artificial Sequence:  Enzymatic Nucleic Acid
gcagagggggaggaaacucccuucaaggacaucguccggguggaguga

SEQ ID NO: 12938 - RNA, 48 nt, Artificial Sequence
  Description of Artificial Sequence:  Enzymatic Nucleic Acid
ugcgggagggaggaaacucccuucaaggacaucguccgggagagggcu

SEQ ID NO: 12939 - RNA, 48 nt, Artificial Sequence
  Description of Artificial Sequence:  Enzymatic Nucleic Acid
auggcgugggaggaaacucccuucaaggacaucguccggggggagcag

SEQ ID NO: 12940 - RNA, 48 nt, Artificial Sequence
  Description of Artificial Sequence:  Enzymatic Nucleic Acid
cuucauggggaggaaacucccuucaaggacaucguccggggugcggga

SEQ ID NO: 12941 - RNA, 48 nt, Artificial Sequence
  Description of Artificial Sequence:  Enzymatic Nucleic Acid
ggcgacuuggaggaaacucccuucaaggacaucguccgggauggcgug

SEQ ID NO: 12942 - RNA, 48 nt, Artificial Sequence
  Description of Artificial Sequence:  Enzymatic Nucleic Acid
aacggcgaggaggaaacucccuucaaggacaucguccggguucauggc

SEQ ID NO: 12943 - RNA, 48 nt, Artificial Sequence
  Description of Artificial Sequence:  Enzymatic Nucleic Acid
uagaacggggaggaaacucccuucaaggacaucguccggggacuucau

SEQ ID NO: 12944 - RNA, 48 nt, Artificial Sequence
  Description of Artificial Sequence:  Enzymatic Nucleic Acid
cgguagaaggaggaaacucccuucaaggacaucguccgggggcgacuu

SEQ ID NO: 12945 - RNA, 48 nt, Artificial Sequence
  Description of Artificial Sequence:  Enzymatic Nucleic Acid
ucuggcagggaggaaacucccuucaaggacaucguccggggguagaac

SEQ ID NO: 12946 - RNA, 48 nt, Artificial Sequence
  Description of Artificial Sequence:  Enzymatic Nucleic Acid
uguucuggggaggaaacucccuucaaggacaucguccgggagcgguag

SEQ ID NO: 12947 - RNA, 48 nt, Artificial Sequence
  Description of Artificial Sequence:  Enzymatic Nucleic Acid
gugguguuggaggaaacucccuucaaggacaucguccggguggcagcg

SEQ ID NO: 12948 - RNA, 48 nt, Artificial Sequence
  Description of Artificial Sequence:  Enzymatic Nucleic Acid
uuuuuccaggaggaaacucccuucaaggacaucguccgggagaggugg

SEQ ID NO: 12949 - RNA, 48 nt, Artificial Sequence
  Description of Artificial Sequence:  Enzymatic Nucleic Acid
ccuuuuucggaggaaacucccuucaaggacaucguccgggacagaggu

SEQ ID NO: 12950 - RNA, 48 nt, Artificial Sequence
  Description of Artificial Sequence:  Enzymatic Nucleic Acid
gccuuuuuggaggaaacucccuucaaggacaucguccgggcacagagg

SEQ ID NO: 12951 - RNA, 48 nt, Artificial Sequence
  Description of Artificial Sequence:  Enzymatic Nucleic Acid
cgaguugcggaggaaacucccuucaaggacaucguccggguuuuucca

SEQ ID NO: 12952 - RNA, 48 nt, Artificial Sequence
  Description of Artificial Sequence:  Enzymatic Nucleic Acid
ccgaguugggaggaaacucccuucaaggacaucguccgggcuuuuucc

SEQ ID NO: 12953 - RNA, 48 nt, Artificial Sequence
  Description of Artificial Sequence:  Enzymatic Nucleic Acid
aucaccgcggaggaaacucccuucaaggacaucguccggggaguugcc

SEQ ID NO: 12954 - RNA, 48 nt, Artificial Sequence
  Description of Artificial Sequence:  Enzymatic Nucleic Acid
caucaccgggaggaaacucccuucaaggacaucguccgggcgaguugc

SEQ ID NO: 12955 - RNA, 48 nt, Artificial Sequence
  Description of Artificial Sequence:  Enzymatic Nucleic Acid
cccaucacggaggaaacucccuucaaggacaucguccggggccgaguu

SEQ ID NO: 12956 - RNA, 48 nt, Artificial Sequence
  Description of Artificial Sequence:  Enzymatic Nucleic Acid
gcccaucaggaggaaacucccuucaaggacaucguccgggcgccgagu

SEQ ID NO: 12957 - RNA, 48 nt, Artificial Sequence
  Description of Artificial Sequence:  Enzymatic Nucleic Acid
ccgcccauggaggaaacucccuucaaggacaucguccgggaccgccga

SEQ ID NO: 12958 - RNA, 48 nt, Artificial Sequence
  Description of Artificial Sequence:  Enzymatic Nucleic Acid
accccgccggaggaaacucccuucaaggacaucguccgggaucaccgc

SEQ ID NO: 12959 - RNA, 48 nt, Artificial Sequence
  Description of Artificial Sequence:  Enzymatic Nucleic Acid
caccccgcggaggaaacucccuucaaggacaucguccgggcaucaccg

SEQ ID NO: 12960 - RNA, 48 nt, Artificial Sequence
  Description of Artificial Sequence:  Enzymatic Nucleic Acid
gcaccccgggaggaaacucccuucaaggacaucguccgggccaucacc

SEQ ID NO: 12961 - RNA, 48 nt, Artificial Sequence
  Description of Artificial Sequence:  Enzymatic Nucleic Acid
gagcacccggaggaaacucccuucaaggacaucguccggggcccauca

SEQ ID NO: 12962 - RNA, 48 nt, Artificial Sequence
  Description of Artificial Sequence:  Enzymatic Nucleic Acid
agagcaccggaggaaacucccuucaaggacaucguccgggcgcccauc

SEQ ID NO: 12963 - RNA, 48 nt, Artificial Sequence
  Description of Artificial Sequence:  Enzymatic Nucleic Acid
aagagcacggaggaaacucccuucaaggacaucguccgggccgcccau

SEQ ID NO: 12964 - RNA, 48 nt, Artificial Sequence
  Description of Artificial Sequence:  Enzymatic Nucleic Acid
gaagagcaggaggaaacucccuucaaggacaucguccgggcccgccca

SEQ ID NO: 12965 - RNA, 48 nt, Artificial Sequence
  Description of Artificial Sequence:  Enzymatic Nucleic Acid
cugaagagggaggaaacucccuucaaggacaucguccgggaccccgcc

SEQ ID NO: 12966 - RNA, 48 nt, Artificial Sequence
  Description of Artificial Sequence:  Enzymatic Nucleic Acid
ggccggugggaggaaacucccuucaaggacaucguccgggugaagagc

SEQ ID NO: 12967 - RNA, 48 nt, Artificial Sequence
  Description of Artificial Sequence:  Enzymatic Nucleic Acid
caggaggcggaggaaacucccuucaaggacaucguccgggggugcuga

SEQ ID NO: 12968 - RNA, 48 nt, Artificial Sequence
  Description of Artificial Sequence:  Enzymatic Nucleic Acid
ccaggaggggaggaaacucccuucaaggacaucguccgggcggugcug

SEQ ID NO: 12969 - RNA, 48 nt, Artificial Sequence
  Description of Artificial Sequence:  Enzymatic Nucleic Acid
agguugccggaggaaacucccuucaaggacaucguccgggaggaggcc

SEQ ID NO: 12970 - RNA, 48 nt, Artificial Sequence
  Description of Artificial Sequence:  Enzymatic Nucleic Acid
cagguugcggaggaaacucccuucaaggacaucguccgggcaggaggc

SEQ ID NO: 12971 - RNA, 48 nt, Artificial Sequence
  Description of Artificial Sequence:  Enzymatic Nucleic Acid
gcagguugggaggaaacucccuucaaggacaucguccgggccaggagg

SEQ ID NO: 12972 - RNA, 48 nt, Artificial Sequence
  Description of Artificial Sequence:  Enzymatic Nucleic Acid
agggccagggaggaaacucccuucaaggacaucguccgggagguugcc

SEQ ID NO: 12973 - RNA, 48 nt, Artificial Sequence
  Description of Artificial Sequence:  Enzymatic Nucleic Acid
cccagggcggaggaaacucccuucaaggacaucguccgggagcagguu

SEQ ID NO: 12974 - RNA, 48 nt, Artificial Sequence
  Description of Artificial Sequence:  Enzymatic Nucleic Acid
ccccagggggaggaaacucccuucaaggacaucguccgggcagcaggu

SEQ ID NO: 12975 - RNA, 48 nt, Artificial Sequence
  Description of Artificial Sequence:  Enzymatic Nucleic Acid
agcagcccggaggaaacucccuucaaggacaucguccgggagggccag

SEQ ID NO: 12976 - RNA, 48 nt, Artificial Sequence
  Description of Artificial Sequence:  Enzymatic Nucleic Acid
cagcagccggaggaaacucccuucaaggacaucguccgggcagggcca

SEQ ID NO: 12977 - RNA, 48 nt, Artificial Sequence
  Description of Artificial Sequence:  Enzymatic Nucleic Acid
ccagcagcggaggaaacucccuucaaggacaucguccgggccagggcc

SEQ ID NO: 12978 - RNA, 48 nt, Artificial Sequence
  Description of Artificial Sequence:  Enzymatic Nucleic Acid
gccagcagggaggaaacucccuucaaggacaucguccgggcccagggc

SEQ ID NO: 12979 - RNA, 48 nt, Artificial Sequence
  Description of Artificial Sequence:  Enzymatic Nucleic Acid
cgcgccagggaggaaacucccuucaaggacaucguccgggagccccag

SEQ ID NO: 12980 - RNA, 48 nt, Artificial Sequence
  Description of Artificial Sequence:  Enzymatic Nucleic Acid
gagcgcgcggaggaaacucccuucaaggacaucguccgggagcagccc

SEQ ID NO: 12981 - RNA, 48 nt, Artificial Sequence
  Description of Artificial Sequence:  Enzymatic Nucleic Acid
cgagcgcgggaggaaacucccuucaaggacaucguccgggcagcagcc

SEQ ID NO: 12982 - RNA, 48 nt, Artificial Sequence
  Description of Artificial Sequence:  Enzymatic Nucleic Acid
cccgagcgggaggaaacucccuucaaggacaucguccggggccagcag

SEQ ID NO: 12983 - RNA, 48 nt, Artificial Sequence
  Description of Artificial Sequence:  Enzymatic Nucleic Acid
gccccgagggaggaaacucccuucaaggacaucguccggggcgccagc

SEQ ID NO: 12984 - RNA, 48 nt, Artificial Sequence
  Description of Artificial Sequence:  Enzymatic Nucleic Acid
cccagcccggaggaaacucccuucaaggacaucguccggggagcgcgc

SEQ ID NO: 12985 - RNA, 48 nt, Artificial Sequence
  Description of Artificial Sequence:  Enzymatic Nucleic Acid
ccccagccggaggaaacucccuucaaggacaucguccgggcgagcgcg

SEQ ID NO: 12986 - RNA, 48 nt, Artificial Sequence
  Description of Artificial Sequence:  Enzymatic Nucleic Acid
accccagcggaggaaacucccuucaaggacaucguccgggccgagcgc

SEQ ID NO: 12987 - RNA, 48 nt, Artificial Sequence
  Description of Artificial Sequence:  Enzymatic Nucleic Acid
caccccagggaggaaacucccuucaaggacaucguccgggcccgagcg

SEQ ID NO: 12988 - RNA, 48 nt, Artificial Sequence
  Description of Artificial Sequence:  Enzymatic Nucleic Acid
caccacccggaggaaacucccuucaaggacaucguccgggagccccga

SEQ ID NO: 12989 - RNA, 48 nt, Artificial Sequence
  Description of Artificial Sequence:  Enzymatic Nucleic Acid
gcaccaccggaggaaacucccuucaaggacaucguccgggcagccccg

SEQ ID NO: 12990 - RNA, 48 nt, Artificial Sequence
  Description of Artificial Sequence:  Enzymatic Nucleic Acid
agcaccacggaggaaacucccuucaaggacaucguccgggccagcccc

SEQ ID NO: 12991 - RNA, 48 nt, Artificial Sequence
  Description of Artificial Sequence:  Enzymatic Nucleic Acid
gagcaccaggaggaaacucccuucaaggacaucguccgggcccagccc

SEQ ID NO: 12992 - RNA, 48 nt, Artificial Sequence
  Description of Artificial Sequence:  Enzymatic Nucleic Acid
gcgagcacggaggaaacucccuucaaggacaucguccgggaccccagc

SEQ ID NO: 12993 - RNA, 48 nt, Artificial Sequence
  Description of Artificial Sequence:  Enzymatic Nucleic Acid
cgcgagcaggaggaaacucccuucaaggacaucguccgggcaccccag

SEQ ID NO: 12994 - RNA, 48 nt, Artificial Sequence
  Description of Artificial Sequence:  Enzymatic Nucleic Acid
gccgcgagggaggaaacucccuucaaggacaucguccgggaccacccc

SEQ ID NO: 12995 - RNA, 48 nt, Artificial Sequence
  Description of Artificial Sequence:  Enzymatic Nucleic Acid
ggacgccgggaggaaacucccuucaaggacaucguccggggagcacca

SEQ ID NO: 12996 - RNA, 48 nt, Artificial Sequence
  Description of Artificial Sequence:  Enzymatic Nucleic Acid
guggacgcggaggaaacucccuucaaggacaucguccggggcgagcac

SEQ ID NO: 12997 - RNA, 48 nt, Artificial Sequence
  Description of Artificial Sequence:  Enzymatic Nucleic Acid
aguggacgggaggaaacucccuucaaggacaucguccgggcgcgagca

SEQ ID NO: 12998 - RNA, 48 nt, Artificial Sequence
  Description of Artificial Sequence:  Enzymatic Nucleic Acid
gcaguggaggaggaaacucccuucaaggacaucguccggggccgcgag

SEQ ID NO: 12999 - RNA, 48 nt, Artificial Sequence
  Description of Artificial Sequence:  Enzymatic Nucleic Acid
agcgggcgggaggaaacucccuucaaggacaucguccgggaguggacg

SEQ ID NO: 13000 - RNA, 48 nt, Artificial Sequence
  Description of Artificial Sequence:  Enzymatic Nucleic Acid
gcagcgggggaggaaacucccuucaaggacaucguccggggcagugga

SEQ ID NO: 13001 - RNA, 48 nt, Artificial Sequence
  Description of Artificial Sequence:  Enzymatic Nucleic Acid
gagggcagggaggaaacucccuucaaggacaucguccggggggcgcag

SEQ ID NO: 13002 - RNA, 48 nt, Artificial Sequence
  Description of Artificial Sequence:  Enzymatic Nucleic Acid
accgagggggaggaaacucccuucaaggacaucguccgggagcgggcg

SEQ ID NO: 13003 - RNA, 48 nt, Artificial Sequence
  Description of Artificial Sequence:  Enzymatic Nucleic Acid
uagaagacggaggaaacucccuucaaggacaucguccggggagggcag

SEQ ID NO: 13004 - RNA, 48 nt, Artificial Sequence
  Description of Artificial Sequence:  Enzymatic Nucleic Acid
guagaagaggaggaaacucccuucaaggacaucguccgggcgagggca

SEQ ID NO: 13005 - RNA, 48 nt, Artificial Sequence
  Description of Artificial Sequence:  Enzymatic Nucleic Acid
cacaccagggaggaaacucccuucaaggacaucguccgggauguagaa

SEQ ID NO: 13006 - RNA, 48 nt, Artificial Sequence
  Description of Artificial Sequence:  Enzymatic Nucleic Acid
ccacacacggaggaaacucccuucaaggacaucguccgggagcaugua

SEQ ID NO: 13007 - RNA, 48 nt, Artificial Sequence
  Description of Artificial Sequence:  Enzymatic Nucleic Acid
gccacacaggaggaaacucccuucaaggacaucguccgggcagcaugu

SEQ ID NO: 13008 - RNA, 48 nt, Artificial Sequence
  Description of Artificial Sequence:  Enzymatic Nucleic Acid
aggccacaggaggaaacucccuucaaggacaucguccgggaccagcau

SEQ ID NO: 13009 - RNA, 48 nt, Artificial Sequence
  Description of Artificial Sequence:  Enzymatic Nucleic Acid
ucaggccaggaggaaacucccuucaaggacaucguccgggacaccagc

SEQ ID NO: 13010 - RNA, 48 nt, Artificial Sequence
  Description of Artificial Sequence:  Enzymatic Nucleic Acid
cgucaggcggaggaaacucccuucaaggacaucguccgggacacacca

SEQ ID NO: 13011 - RNA, 48 nt, Artificial Sequence
  Description of Artificial Sequence:  Enzymatic Nucleic Acid
ccgucaggggaggaaacucccuucaaggacaucguccgggcacacacc

SEQ ID NO: 13012 - RNA, 48 nt, Artificial Sequence
  Description of Artificial Sequence:  Enzymatic Nucleic Acid
gugaccguggaggaaacucccuucaaggacaucguccgggaggccaca

SEQ ID NO: 13013 - RNA, 48 nt, Artificial Sequence
  Description of Artificial Sequence:  Enzymatic Nucleic Acid
ucggugacggaggaaacucccuucaaggacaucguccggggucaggcc

SEQ ID NO: 13014 - RNA, 48 nt, Artificial Sequence
  Description of Artificial Sequence:  Enzymatic Nucleic Acid
gucggugaggaggaaacucccuucaaggacaucguccgggcgucaggc

SEQ ID NO: 13015 - RNA, 48 nt, Artificial Sequence
  Description of Artificial Sequence:  Enzymatic Nucleic Acid
cagcaaguggaggaaacucccuucaaggacaucguccgggggugaccg

SEQ ID NO: 13016 - RNA, 48 nt, Artificial Sequence
  Description of Artificial Sequence:  Enzymatic Nucleic Acid
uugcccagggaggaaacucccuucaaggacaucguccgggaagucggu

SEQ ID NO: 13017 - RNA, 48 nt, Artificial Sequence
  Description of Artificial Sequence:  Enzymatic Nucleic Acid
cacuugccggaggaaacucccuucaaggacaucguccgggagcaaguc

SEQ ID NO: 13018 - RNA, 48 nt, Artificial Sequence
  Description of Artificial Sequence:  Enzymatic Nucleic Acid
gcacuugcggaggaaacucccuucaaggacaucguccgggcagcaagu

SEQ ID NO: 13019 - RNA, 48 nt, Artificial Sequence
  Description of Artificial Sequence:  Enzymatic Nucleic Acid
ggcacuugggaggaaacucccuucaaggacaucguccgggccagcaag

SEQ ID NO: 13020 - RNA, 48 nt, Artificial Sequence
  Description of Artificial Sequence:  Enzymatic Nucleic Acid
aggaggcaggaggaaacucccuucaaggacaucguccggguugcccag

SEQ ID NO: 13021 - RNA, 48 nt, Artificial Sequence
  Description of Artificial Sequence:  Enzymatic Nucleic Acid
uuaggaggggaggaaacucccuucaaggacaucguccgggacuugccc

SEQ ID NO: 13022 - RNA, 48 nt, Artificial Sequence
  Description of Artificial Sequence:  Enzymatic Nucleic Acid
ccaccgggggaggaaacucccuucaaggacaucguccggguuaggagg

SEQ ID NO: 13023 - RNA, 48 nt, Artificial Sequence
  Description of Artificial Sequence:  Enzymatic Nucleic Acid
agcaccacggaggaaacucccuucaaggacaucguccggggggcuuag

SEQ ID NO: 13024 - RNA, 48 nt, Artificial Sequence
  Description of Artificial Sequence:  Enzymatic Nucleic Acid
cagcaccaggaggaaacucccuucaaggacaucguccgggcgggcuua

SEQ ID NO: 13025 - RNA, 48 nt, Artificial Sequence
  Description of Artificial Sequence:  Enzymatic Nucleic Acid
gccagcacggaggaaacucccuucaaggacaucguccgggaccgggcu

SEQ ID NO: 13026 - RNA, 48 nt, Artificial Sequence
  Description of Artificial Sequence:  Enzymatic Nucleic Acid
agccagcaggaggaaacucccuucaaggacaucguccgggcaccgggc

SEQ ID NO: 13027 - RNA, 48 nt, Artificial Sequence
  Description of Artificial Sequence:  Enzymatic Nucleic Acid
gcagccagggaggaaacucccuucaaggacaucguccgggaccaccgg

SEQ ID NO: 13028 - RNA, 48 nt, Artificial Sequence
  Description of Artificial Sequence:  Enzymatic Nucleic Acid
uaggcagcggaggaaacucccuucaaggacaucguccgggagcaccac

SEQ ID NO: 13029 - RNA, 48 nt, Artificial Sequence
  Description of Artificial Sequence:  Enzymatic Nucleic Acid
guaggcagggaggaaacucccuucaaggacaucguccgggcagcacca

SEQ ID NO: 13030 - RNA, 48 nt, Artificial Sequence
  Description of Artificial Sequence:  Enzymatic Nucleic Acid
agcguaggggaggaaacucccuucaaggacaucguccgggagccagca

SEQ ID NO: 13031 - RNA, 48 nt, Artificial Sequence
  Description of Artificial Sequence:  Enzymatic Nucleic Acid
guucugagggaggaaacucccuucaaggacaucguccgggguaggcag

SEQ ID NO: 13032 - RNA, 48 nt, Artificial Sequence
  Description of Artificial Sequence:  Enzymatic Nucleic Acid
cuccgguuggaggaaacucccuucaaggacaucguccgggugagcgua

SEQ ID NO: 13033 - RNA, 48 nt, Artificial Sequence
  Description of Artificial Sequence:  Enzymatic Nucleic Acid
gcagacucggaggaaacucccuucaaggacaucguccggggguucuga

SEQ ID NO: 13034 - RNA, 48 nt, Artificial Sequence
  Description of Artificial Sequence:  Enzymatic Nucleic Acid
cgcagacuggaggaaacucccuucaaggacaucguccgggcgguucug

SEQ ID NO: 13035 - RNA, 48 nt, Artificial Sequence
  Description of Artificial Sequence:  Enzymatic Nucleic Acid
cccgcagaggaggaaacucccuucaaggacaucguccggguccgguuc

SEQ ID NO: 13036 - RNA, 48 nt, Artificial Sequence
  Description of Artificial Sequence:  Enzymatic Nucleic Acid
agcacccgggaggaaacucccuucaaggacaucguccgggagacuccg

SEQ ID NO: 13037 - RNA, 48 nt, Artificial Sequence
  Description of Artificial Sequence:  Enzymatic Nucleic Acid
caagcaccggaggaaacucccuucaaggacaucguccggggcagacuc

SEQ ID NO: 13038 - RNA, 48 nt, Artificial Sequence
  Description of Artificial Sequence:  Enzymatic Nucleic Acid
gcaagcacggaggaaacucccuucaaggacaucguccgggcgcagacu

SEQ ID NO: 13039 - RNA, 48 nt, Artificial Sequence
  Description of Artificial Sequence:  Enzymatic Nucleic Acid
cgcaagcaggaggaaacucccuucaaggacaucguccgggccgcagac

SEQ ID NO: 13040 - RNA, 48 nt, Artificial Sequence
  Description of Artificial Sequence:  Enzymatic Nucleic Acid
ggcgcaagggaggaaacucccuucaaggacaucguccgggacccgcag

SEQ ID NO: 13041 - RNA, 48 nt, Artificial Sequence
  Description of Artificial Sequence:  Enzymatic Nucleic Acid
ugcgggcgggaggaaacucccuucaaggacaucguccgggaagcaccc

SEQ ID NO: 13042 - RNA, 48 nt, Artificial Sequence
  Description of Artificial Sequence:  Enzymatic Nucleic Acid
aaugcgggggaggaaacucccuucaaggacaucguccggggcaagcac

SEQ ID NO: 13043 - RNA, 48 nt, Artificial Sequence
  Description of Artificial Sequence:  Enzymatic Nucleic Acid
guccaaugggaggaaacucccuucaaggacaucguccggggggcgcaa

SEQ ID NO: 13044 - RNA, 48 nt, Artificial Sequence
  Description of Artificial Sequence:  Enzymatic Nucleic Acid
gaguugucggaggaaacucccuucaaggacaucguccgggaaugcggg

SEQ ID NO: 13045 - RNA, 48 nt, Artificial Sequence
  Description of Artificial Sequence:  Enzymatic Nucleic Acid
cgaguuguggaggaaacucccuucaaggacaucguccgggcaaugcgg

SEQ ID NO: 13046 - RNA, 48 nt, Artificial Sequence
  Description of Artificial Sequence:  Enzymatic Nucleic Acid
uggcacaaggaggaaacucccuucaaggacaucguccggggaguuguc

SEQ ID NO: 13047 - RNA, 48 nt, Artificial Sequence
  Description of Artificial Sequence:  Enzymatic Nucleic Acid
gcuuggcaggaggaaacucccuucaaggacaucguccgggaacgaguu

SEQ ID NO: 13048 - RNA, 48 nt, Artificial Sequence
  Description of Artificial Sequence:  Enzymatic Nucleic Acid
aggcuuggggaggaaacucccuucaaggacaucguccgggacaacgag

SEQ ID NO: 13049 - RNA, 48 nt, Artificial Sequence
  Description of Artificial Sequence:  Enzymatic Nucleic Acid
ggcgaaggggaggaaacucccuucaaggacaucguccggguuggcaca

SEQ ID NO: 13050 - RNA, 48 nt, Artificial Sequence
  Description of Artificial Sequence:  Enzymatic Nucleic Acid
gaagaaggggaggaaacucccuucaaggacaucguccggggaaggcuu

SEQ ID NO: 13051 - RNA, 48 nt, Artificial Sequence
  Description of Artificial Sequence:  Enzymatic Nucleic Acid
aagaaggaggaggaaacucccuucaaggacaucguccgggaugaagaa

SEQ ID NO: 13052 - RNA, 48 nt, Artificial Sequence
  Description of Artificial Sequence:  Enzymatic Nucleic Acid
ggagagccggaggaaacucccuucaaggacaucguccgggaaagaagg

SEQ ID NO: 13053 - RNA, 48 nt, Artificial Sequence
  Description of Artificial Sequence:  Enzymatic Nucleic Acid
aggagagcggaggaaacucccuucaaggacaucguccgggcaaagaag

SEQ ID NO: 13054 - RNA, 48 nt, Artificial Sequence
  Description of Artificial Sequence:  Enzymatic Nucleic Acid
gaggagagggaggaaacucccuucaaggacaucguccgggccaaagaa

SEQ ID NO: 13055 - RNA, 48 nt, Artificial Sequence
  Description of Artificial Sequence:  Enzymatic Nucleic Acid
ugcaguguggaggaaacucccuucaaggacaucguccggggaggagag

SEQ ID NO: 13056 - RNA, 48 nt, Artificial Sequence
  Description of Artificial Sequence:  Enzymatic Nucleic Acid
aggaguugggaggaaacucccuucaaggacaucguccgggagugucga

SEQ ID NO: 13057 - RNA, 48 nt, Artificial Sequence
  Description of Artificial Sequence:  Enzymatic Nucleic Acid
gccauggcggaggaaacucccuucaaggacaucguccgggaggaguug

SEQ ID NO: 13058 - RNA, 48 nt, Artificial Sequence
  Description of Artificial Sequence:  Enzymatic Nucleic Acid
ugccauggggaggaaacucccuucaaggacaucguccgggcaggaguu

SEQ ID NO: 13059 - RNA, 48 nt, Artificial Sequence
  Description of Artificial Sequence:  Enzymatic Nucleic Acid
uccagugcggaggaaacucccuucaaggacaucguccgggauggccag

SEQ ID NO: 13060 - RNA, 48 nt, Artificial Sequence
  Description of Artificial Sequence:  Enzymatic Nucleic Acid
cuccagugggaggaaacucccuucaaggacaucguccgggcauggcca

SEQ ID NO: 13061 - RNA, 48 nt, Artificial Sequence
  Description of Artificial Sequence:  Enzymatic Nucleic Acid
cagcacucggaggaaacucccuucaaggacaucguccgggagugccau

SEQ ID NO: 13062 - RNA, 48 nt, Artificial Sequence
  Description of Artificial Sequence:  Enzymatic Nucleic Acid
ccagcacuggaggaaacucccuucaaggacaucguccgggcagugcca

SEQ ID NO: 13063 - RNA, 48 nt, Artificial Sequence
  Description of Artificial Sequence:  Enzymatic Nucleic Acid
agccagcaggaggaaacucccuucaaggacaucguccggguccagugc

SEQ ID NO: 13064 - RNA, 48 nt, Artificial Sequence
  Description of Artificial Sequence:  Enzymatic Nucleic Acid
agagccagggaggaaacucccuucaaggacaucguccgggacuccagu

SEQ ID NO: 13065 - RNA, 48 nt, Artificial Sequence
  Description of Artificial Sequence:  Enzymatic Nucleic Acid
gggagagcggaggaaacucccuucaaggacaucguccgggagcacucc

SEQ ID NO: 13066 - RNA, 48 nt, Artificial Sequence
  Description of Artificial Sequence:  Enzymatic Nucleic Acid
agggagagggaggaaacucccuucaaggacaucguccgggcagcacuc

SEQ ID NO: 13067 - RNA, 48 nt, Artificial Sequence
  Description of Artificial Sequence:  Enzymatic Nucleic Acid
agggugccggaggaaacucccuucaaggacaucguccggguagggaga

SEQ ID NO: 13068 - RNA, 48 nt, Artificial Sequence
  Description of Artificial Sequence:  Enzymatic Nucleic Acid
aagggugcggaggaaacucccuucaaggacaucguccgggcuagggag

SEQ ID NO: 13069 - RNA, 48 nt, Artificial Sequence
  Description of Artificial Sequence:  Enzymatic Nucleic Acid
aaagggugggaggaaacucccuucaaggacaucguccgggccuaggga

SEQ ID NO: 13070 - RNA, 48 nt, Artificial Sequence
  Description of Artificial Sequence:  Enzymatic Nucleic Acid
ugugccguggaggaaacucccuucaaggacaucguccggggguagaag

SEQ ID NO: 13071 - RNA, 48 nt, Artificial Sequence
  Description of Artificial Sequence:  Enzymatic Nucleic Acid
ugaugugcggaggaaacucccuucaaggacaucguccggggucgguag

SEQ ID NO: 13072 - RNA, 48 nt, Artificial Sequence
  Description of Artificial Sequence:  Enzymatic Nucleic Acid
gugaugugggaggaaacucccuucaaggacaucguccgggcgucggua

SEQ ID NO: 13073 - RNA, 48 nt, Artificial Sequence
  Description of Artificial Sequence:  Enzymatic Nucleic Acid
cccaggcgggaggaaacucccuucaaggacaucguccgggagggugau

SEQ ID NO: 13074 - RNA, 48 nt, Artificial Sequence
  Description of Artificial Sequence:  Enzymatic Nucleic Acid
cgcccaggggaggaaacucccuucaaggacaucguccggggcagggug

SEQ ID NO: 13075 - RNA, 48 nt, Artificial Sequence
  Description of Artificial Sequence:  Enzymatic Nucleic Acid
agugcgccggaggaaacucccuucaaggacaucguccgggaggcgcag

SEQ ID NO: 13076 - RNA, 48 nt, Artificial Sequence
  Description of Artificial Sequence:  Enzymatic Nucleic Acid
cagugcgcggaggaaacucccuucaaggacaucguccgggcaggcgca

SEQ ID NO: 13077 - RNA, 48 nt, Artificial Sequence
  Description of Artificial Sequence:  Enzymatic Nucleic Acid
ccagugcgggaggaaacucccuucaaggacaucguccgggccaggcgc

SEQ ID NO: 13078 - RNA, 48 nt, Artificial Sequence
  Description of Artificial Sequence:  Enzymatic Nucleic Acid
caccagugggaggaaacucccuucaaggacaucguccggggcccaggc

SEQ ID NO: 13079 - RNA, 48 nt, Artificial Sequence
  Description of Artificial Sequence:  Enzymatic Nucleic Acid
ggggccacggaggaaacucccuucaaggacaucguccgggagugcgcc

SEQ ID NO: 13080 - RNA, 48 nt, Artificial Sequence
  Description of Artificial Sequence:  Enzymatic Nucleic Acid
cggggccaggaggaaacucccuucaaggacaucguccgggcagugcgc

SEQ ID NO: 13081 - RNA, 48 nt, Artificial Sequence
  Description of Artificial Sequence:  Enzymatic Nucleic Acid
accggggcggaggaaacucccuucaaggacaucguccgggaccagugc

SEQ ID NO: 13082 - RNA, 48 nt, Artificial Sequence
  Description of Artificial Sequence:  Enzymatic Nucleic Acid
caccggggggaggaaacucccuucaaggacaucguccgggcaccagug

SEQ ID NO: 13083 - RNA, 48 nt, Artificial Sequence
  Description of Artificial Sequence:  Enzymatic Nucleic Acid
cucaccacggaggaaacucccuucaaggacaucguccgggggggccac

SEQ ID NO: 13084 - RNA, 48 nt, Artificial Sequence
  Description of Artificial Sequence:  Enzymatic Nucleic Acid
gcucaccaggaggaaacucccuucaaggacaucguccgggcggggcca

SEQ ID NO: 13085 - RNA, 48 nt, Artificial Sequence
  Description of Artificial Sequence:  Enzymatic Nucleic Acid
gcgcucacggaggaaacucccuucaaggacaucguccgggaccggggc

SEQ ID NO: 13086 - RNA, 48 nt, Artificial Sequence
  Description of Artificial Sequence:  Enzymatic Nucleic Acid
ggcgcucaggaggaaacucccuucaaggacaucguccgggcaccgggg

SEQ ID NO: 13087 - RNA, 48 nt, Artificial Sequence
  Description of Artificial Sequence:  Enzymatic Nucleic Acid
aaggcgcuggaggaaacucccuucaaggacaucguccgggaccaccgg

SEQ ID NO: 13088 - RNA, 48 nt, Artificial Sequence
  Description of Artificial Sequence:  Enzymatic Nucleic Acid
agaaggcgggaggaaacucccuucaaggacaucguccgggucaccacc

SEQ ID NO: 13089 - RNA, 48 nt, Artificial Sequence
  Description of Artificial Sequence:  Enzymatic Nucleic Acid
ggagaaggggaggaaacucccuucaaggacaucguccggggcucacca

SEQ ID NO: 13090 - RNA, 48 nt, Artificial Sequence
  Description of Artificial Sequence:  Enzymatic Nucleic Acid
cagaaagcggaggaaacucccuucaaggacaucguccgggagggagaa

SEQ ID NO: 13091 - RNA, 48 nt, Artificial Sequence
  Description of Artificial Sequence:  Enzymatic Nucleic Acid
gcagaaagggaggaaacucccuucaaggacaucguccgggcagggaga

SEQ ID NO: 13092 - RNA, 48 nt, Artificial Sequence
  Description of Artificial Sequence:  Enzymatic Nucleic Acid
guagcgcgggaggaaacucccuucaaggacaucguccgggagaaagcc

SEQ ID NO: 13093 - RNA, 48 nt, Artificial Sequence
  Description of Artificial Sequence:  Enzymatic Nucleic Acid
agguagcgggaggaaacucccuucaaggacaucguccggggcagaaag

SEQ ID NO: 13094 - RNA, 48 nt, Artificial Sequence
  Description of Artificial Sequence:  Enzymatic Nucleic Acid
aaagguagggaggaaacucccuucaaggacaucguccggggcgcagaa

SEQ ID NO: 13095 - RNA, 48 nt, Artificial Sequence
  Description of Artificial Sequence:  Enzymatic Nucleic Acid
ccgaagccggaggaaacucccuucaaggacaucguccgggaugaaagg

SEQ ID NO: 13096 - RNA, 48 nt, Artificial Sequence
  Description of Artificial Sequence:  Enzymatic Nucleic Acid
cccgaagcggaggaaacucccuucaaggacaucguccgggcaugaaag

SEQ ID NO: 13097 - RNA, 48 nt, Artificial Sequence
  Description of Artificial Sequence:  Enzymatic Nucleic Acid
ucccgaagggaggaaacucccuucaaggacaucguccgggccaugaaa

SEQ ID NO: 13098 - RNA, 48 nt, Artificial Sequence
  Description of Artificial Sequence:  Enzymatic Nucleic Acid
gaacuuccggaggaaacucccuucaaggacaucguccggggaagccca

SEQ ID NO: 13099 - RNA, 48 nt, Artificial Sequence
  Description of Artificial Sequence:  Enzymatic Nucleic Acid
cgaacuucggaggaaacucccuucaaggacaucguccgggcgaagccc

SEQ ID NO: 13100 - RNA, 48 nt, Artificial Sequence
  Description of Artificial Sequence:  Enzymatic Nucleic Acid
acgaacuuggaggaaacucccuucaaggacaucguccgggccgaagcc

SEQ ID NO: 13101 - RNA, 48 nt, Artificial Sequence
  Description of Artificial Sequence:  Enzymatic Nucleic Acid
ugcacgaaggaggaaacucccuucaaggacaucguccggguucccgaa

SEQ ID NO: 13102 - RNA, 48 nt, Artificial Sequence
  Description of Artificial Sequence:  Enzymatic Nucleic Acid
guacugcaggaggaaacucccuucaaggacaucguccggggaacuucc

SEQ ID NO: 13103 - RNA, 48 nt, Artificial Sequence
  Description of Artificial Sequence:  Enzymatic Nucleic Acid
caguacugggaggaaacucccuucaaggacaucguccgggacgaacuu

SEQ ID NO: 13104 - RNA, 48 nt, Artificial Sequence
  Description of Artificial Sequence:  Enzymatic Nucleic Acid
gggcaguaggaggaaacucccuucaaggacaucguccgggugcacgaa

SEQ ID NO: 13105 - RNA, 48 nt, Artificial Sequence
  Description of Artificial Sequence:  Enzymatic Nucleic Acid
ugccggggggaggaaacucccuucaaggacaucguccgggaguacugc

SEQ ID NO: 13106 - RNA, 48 nt, Artificial Sequence
  Description of Artificial Sequence:  Enzymatic Nucleic Acid
ccaggugcggaggaaacucccuucaaggacaucguccgggggggcagu

SEQ ID NO: 13107 - RNA, 48 nt, Artificial Sequence
  Description of Artificial Sequence:  Enzymatic Nucleic Acid
accaggugggaggaaacucccuucaaggacaucguccgggcggggcag

SEQ ID NO: 13108 - RNA, 48 nt, Artificial Sequence
  Description of Artificial Sequence:  Enzymatic Nucleic Acid
uaaagcacggaggaaacucccuucaaggacaucguccgggaggugccg

SEQ ID NO: 13109 - RNA, 48 nt, Artificial Sequence
  Description of Artificial Sequence:  Enzymatic Nucleic Acid
auaaagcaggaggaaacucccuucaaggacaucguccgggcaggugcc

SEQ ID NO: 13110 - RNA, 48 nt, Artificial Sequence
  Description of Artificial Sequence:  Enzymatic Nucleic Acid
ggauaaagggaggaaacucccuucaaggacaucguccgggaccaggug

SEQ ID NO: 13111 - RNA, 48 nt, Artificial Sequence
  Description of Artificial Sequence:  Enzymatic Nucleic Acid
uggaccauggaggaaacucccuucaaggacaucguccggguggauaaa

SEQ ID NO: 13112 - RNA, 48 nt, Artificial Sequence
  Description of Artificial Sequence:  Enzymatic Nucleic Acid
ucguggacggaggaaacucccuucaaggacaucguccgggaucuggau

SEQ ID NO: 13113 - RNA, 48 nt, Artificial Sequence
  Description of Artificial Sequence:  Enzymatic Nucleic Acid
cucguggaggaggaaacucccuucaaggacaucguccgggcaucugga

SEQ ID NO: 13114 - RNA, 48 nt, Artificial Sequence
  Description of Artificial Sequence:  Enzymatic Nucleic Acid
gcccuccuggaggaaacucccuucaaggacaucguccgggguggacca

SEQ ID NO: 13115 - RNA, 48 nt, Artificial Sequence
  Description of Artificial Sequence:  Enzymatic Nucleic Acid
gagcccucggaggaaacucccuucaaggacaucguccgggucguggac

SEQ ID NO: 13116 - RNA, 48 nt, Artificial Sequence
  Description of Artificial Sequence:  Enzymatic Nucleic Acid
cgagcccuggaggaaacucccuucaaggacaucguccgggcucgugga

SEQ ID NO: 13117 - RNA, 48 nt, Artificial Sequence
  Description of Artificial Sequence:  Enzymatic Nucleic Acid
agcgagccggaggaaacucccuucaaggacaucguccggguccucgug

SEQ ID NO: 13118 - RNA, 48 nt, Artificial Sequence
  Description of Artificial Sequence:  Enzymatic Nucleic Acid
cagcgagcggaggaaacucccuucaaggacaucguccgggcuccucgu

SEQ ID NO: 13119 - RNA, 48 nt, Artificial Sequence
  Description of Artificial Sequence:  Enzymatic Nucleic Acid
acagcgagggaggaaacucccuucaaggacaucguccgggccuccucg

SEQ ID NO: 13120 - RNA, 48 nt, Artificial Sequence
  Description of Artificial Sequence:  Enzymatic Nucleic Acid
accgacagggaggaaacucccuucaaggacaucguccggggagcccuc

SEQ ID NO: 13121 - RNA, 48 nt, Artificial Sequence
  Description of Artificial Sequence:  Enzymatic Nucleic Acid
agcaccgaggaggaaacucccuucaaggacaucguccgggagcgagcc

SEQ ID NO: 13122 - RNA, 48 nt, Artificial Sequence
  Description of Artificial Sequence:  Enzymatic Nucleic Acid
cccagcacggaggaaacucccuucaaggacaucguccggggacagcga

SEQ ID NO: 13123 - RNA, 48 nt, Artificial Sequence
  Description of Artificial Sequence:  Enzymatic Nucleic Acid
ccccagcaggaggaaacucccuucaaggacaucguccgggcgacagcg

SEQ ID NO: 13124 - RNA, 48 nt, Artificial Sequence
  Description of Artificial Sequence:  Enzymatic Nucleic Acid
uaccccagggaggaaacucccuucaaggacaucguccgggaccgacag

SEQ ID NO: 13125 - RNA, 48 nt, Artificial Sequence
  Description of Artificial Sequence:  Enzymatic Nucleic Acid
gaguacccggaggaaacucccuucaaggacaucguccgggagcaccga

SEQ ID NO: 13126 - RNA, 48 nt, Artificial Sequence
  Description of Artificial Sequence:  Enzymatic Nucleic Acid
agaguaccggaggaaacucccuucaaggacaucguccgggcagcaccg

SEQ ID NO: 13127 - RNA, 48 nt, Artificial Sequence
  Description of Artificial Sequence:  Enzymatic Nucleic Acid
cagaguacggaggaaacucccuucaaggacaucguccgggccagcacc

SEQ ID NO: 13128 - RNA, 48 nt, Artificial Sequence
  Description of Artificial Sequence:  Enzymatic Nucleic Acid
acagaguaggaggaaacucccuucaaggacaucguccgggcccagcac

SEQ ID NO: 13129 - RNA, 48 nt, Artificial Sequence
  Description of Artificial Sequence:  Enzymatic Nucleic Acid
guagagcaggaggaaacucccuucaaggacaucguccgggagaguacc

SEQ ID NO: 13130 - RNA, 48 nt, Artificial Sequence
  Description of Artificial Sequence:  Enzymatic Nucleic Acid
gaguagagggaggaaacucccuucaaggacaucguccgggacagagua

SEQ ID NO: 13131 - RNA, 48 nt, Artificial Sequence
  Description of Artificial Sequence:  Enzymatic Nucleic Acid
ccaugaggggaggaaacucccuucaaggacaucguccggguggaguag

SEQ ID NO: 13132 - RNA, 48 nt, Artificial Sequence
  Description of Artificial Sequence:  Enzymatic Nucleic Acid
agcagcgcggaggaaacucccuucaaggacaucguccgggaugaggcu

SEQ ID NO: 13133 - RNA, 48 nt, Artificial Sequence
  Description of Artificial Sequence:  Enzymatic Nucleic Acid
cagcagcgggaggaaacucccuucaaggacaucguccgggcaugaggc

SEQ ID NO: 13134 - RNA, 48 nt, Artificial Sequence
  Description of Artificial Sequence:  Enzymatic Nucleic Acid
accagcagggaggaaacucccuucaaggacaucguccggggccaugag

SEQ ID NO: 13135 - RNA, 48 nt, Artificial Sequence
  Description of Artificial Sequence:  Enzymatic Nucleic Acid
aggaccagggaggaaacucccuucaaggacaucguccgggagcgccau

SEQ ID NO: 13136 - RNA, 48 nt, Artificial Sequence
  Description of Artificial Sequence:  Enzymatic Nucleic Acid
gcgaggacggaggaaacucccuucaaggacaucguccgggagcagcgc

SEQ ID NO: 13137 - RNA, 48 nt, Artificial Sequence
  Description of Artificial Sequence:  Enzymatic Nucleic Acid
ggcgaggaggaggaaacucccuucaaggacaucguccgggcagcagcg

SEQ ID NO: 13138 - RNA, 48 nt, Artificial Sequence
  Description of Artificial Sequence:  Enzymatic Nucleic Acid
cacgguggggaggaaacucccuucaaggacaucguccggggaggacca

SEQ ID NO: 13139 - RNA, 48 nt, Artificial Sequence
  Description of Artificial Sequence:  Enzymatic Nucleic Acid
gcacagcaggaggaaacucccuucaaggacaucguccggggguggcga

SEQ ID NO: 13140 - RNA, 48 nt, Artificial Sequence
  Description of Artificial Sequence:  Enzymatic Nucleic Acid
uugcacagggaggaaacucccuucaaggacaucguccgggacgguggc

SEQ ID NO: 13141 - RNA, 48 nt, Artificial Sequence
  Description of Artificial Sequence:  Enzymatic Nucleic Acid
agguugcaggaggaaacucccuucaaggacaucguccgggagcacggu

SEQ ID NO: 13142 - RNA, 48 nt, Artificial Sequence
  Description of Artificial Sequence:  Enzymatic Nucleic Acid
cgagguugggaggaaacucccuucaaggacaucguccgggacagcacg

SEQ ID NO: 13143 - RNA, 48 nt, Artificial Sequence
  Description of Artificial Sequence:  Enzymatic Nucleic Acid
cauggcgcggaggaaacucccuucaaggacaucguccggggagguugc

SEQ ID NO: 13144 - RNA, 48 nt, Artificial Sequence
  Description of Artificial Sequence:  Enzymatic Nucleic Acid
gcauggcgggaggaaacucccuucaaggacaucguccgggcgagguug

SEQ ID NO: 13145 - RNA, 48 nt, Artificial Sequence
  Description of Artificial Sequence:  Enzymatic Nucleic Acid
gcgcauggggaggaaacucccuucaaggacaucguccggggccgaggu

SEQ ID NO: 13146 - RNA, 48 nt, Artificial Sequence
  Description of Artificial Sequence:  Enzymatic Nucleic Acid
agguugcgggaggaaacucccuucaaggacaucguccgggauggcgcc

SEQ ID NO: 13147 - RNA, 48 nt, Artificial Sequence
  Description of Artificial Sequence:  Enzymatic Nucleic Acid
agagguugggaggaaacucccuucaaggacaucguccggggcauggcg

SEQ ID NO: 13148 - RNA, 48 nt, Artificial Sequence
  Description of Artificial Sequence:  Enzymatic Nucleic Acid
gugcaucgggaggaaacucccuucaaggacaucguccgggauagaggu

SEQ ID NO: 13149 - RNA, 48 nt, Artificial Sequence
  Description of Artificial Sequence:  Enzymatic Nucleic Acid
cggugcauggaggaaacucccuucaaggacaucguccggggcauagag

SEQ ID NO: 13150 - RNA, 48 nt, Artificial Sequence
  Description of Artificial Sequence:  Enzymatic Nucleic Acid
cgccggugggaggaaacucccuucaaggacaucguccgggaucgcaua

SEQ ID NO: 13151 - RNA, 48 nt, Artificial Sequence
  Description of Artificial Sequence:  Enzymatic Nucleic Acid
gcagccgcggaggaaacucccuucaaggacaucguccgggggugcauc

SEQ ID NO: 13152 - RNA, 48 nt, Artificial Sequence
  Description of Artificial Sequence:  Enzymatic Nucleic Acid
ugcagccgggaggaaacucccuucaaggacaucguccgggcggugcau

SEQ ID NO: 13153 - RNA, 48 nt, Artificial Sequence
  Description of Artificial Sequence:  Enzymatic Nucleic Acid
gcugcagcggaggaaacucccuucaaggacaucguccggggccggugc

SEQ ID NO: 13154 - RNA, 48 nt, Artificial Sequence
  Description of Artificial Sequence:  Enzymatic Nucleic Acid
cgcugcagggaggaaacucccuucaaggacaucguccgggcgccggug

SEQ ID NO: 13155 - RNA, 48 nt, Artificial Sequence
  Description of Artificial Sequence:  Enzymatic Nucleic Acid
ugccgcugggaggaaacucccuucaaggacaucguccgggagccgccg

SEQ ID NO: 13156 - RNA, 48 nt, Artificial Sequence
  Description of Artificial Sequence:  Enzymatic Nucleic Acid
gggugccgggaggaaacucccuucaaggacaucguccgggugcagccg

SEQ ID NO: 13157 - RNA, 48 nt, Artificial Sequence
  Description of Artificial Sequence:  Enzymatic Nucleic Acid
gcgggugcggaggaaacucccuucaaggacaucguccggggcugcagc

SEQ ID NO: 13158 - RNA, 48 nt, Artificial Sequence
  Description of Artificial Sequence:  Enzymatic Nucleic Acid
cgcgggugggaggaaacucccuucaaggacaucguccgggcgcugcag

SEQ ID NO: 13159 - RNA, 48 nt, Artificial Sequence
  Description of Artificial Sequence:  Enzymatic Nucleic Acid
caggagcgggaggaaacucccuucaaggacaucguccggggggugccg

SEQ ID NO: 13160 - RNA, 48 nt, Artificial Sequence
  Description of Artificial Sequence:  Enzymatic Nucleic Acid
ugcaggagggaggaaacucccuucaaggacaucguccggggcgggugc

SEQ ID NO: 13161 - RNA, 48 nt, Artificial Sequence
  Description of Artificial Sequence:  Enzymatic Nucleic Acid
cccuggugggaggaaacucccuucaaggacaucguccgggaggagcgc

SEQ ID NO: 13162 - RNA, 48 nt, Artificial Sequence
  Description of Artificial Sequence:  Enzymatic Nucleic Acid
cacaguccggaggaaacucccuucaaggacaucguccggguggugcag

SEQ ID NO: 13163 - RNA, 48 nt, Artificial Sequence
  Description of Artificial Sequence:  Enzymatic Nucleic Acid
gcacagucggaggaaacucccuucaaggacaucguccgggcuggugca

SEQ ID NO: 13164 - RNA, 48 nt, Artificial Sequence
  Description of Artificial Sequence:  Enzymatic Nucleic Acid
ggcacaguggaggaaacucccuucaaggacaucguccgggccuggugc

SEQ ID NO: 13165 - RNA, 48 nt, Artificial Sequence
  Description of Artificial Sequence:  Enzymatic Nucleic Acid
gcucggcaggaggaaacucccuucaaggacaucguccgggagucccug

SEQ ID NO: 13166 - RNA, 48 nt, Artificial Sequence
  Description of Artificial Sequence:  Enzymatic Nucleic Acid
cggcucggggaggaaacucccuucaaggacaucguccgggacaguccc

SEQ ID NO: 13167 - RNA, 48 nt, Artificial Sequence
  Description of Artificial Sequence:  Enzymatic Nucleic Acid
gcgcggcuggaggaaacucccuucaaggacaucguccgggggcacagu

SEQ ID NO: 13168 - RNA, 48 nt, Artificial Sequence
  Description of Artificial Sequence:  Enzymatic Nucleic Acid
gcgcgcggggaggaaacucccuucaaggacaucguccgggucggcaca

SEQ ID NO: 13169 - RNA, 48 nt, Artificial Sequence
  Description of Artificial Sequence:  Enzymatic Nucleic Acid
uccgcgcgggaggaaacucccuucaaggacaucguccgggggcucggc

SEQ ID NO: 13170 - RNA, 48 nt, Artificial Sequence
  Description of Artificial Sequence:  Enzymatic Nucleic Acid
cguccgcgggaggaaacucccuucaaggacaucguccggggcggcucg

SEQ ID NO: 13171 - RNA, 48 nt, Artificial Sequence
  Description of Artificial Sequence:  Enzymatic Nucleic Acid
cccguccgggaggaaacucccuucaaggacaucguccggggcgcggcu

SEQ ID NO: 13172 - RNA, 48 nt, Artificial Sequence
  Description of Artificial Sequence:  Enzymatic Nucleic Acid
cucccgucggaggaaacucccuucaaggacaucguccggggcgcgcgg

SEQ ID NO: 13173 - RNA, 48 nt, Artificial Sequence
  Description of Artificial Sequence:  Enzymatic Nucleic Acid
ccucccguggaggaaacucccuucaaggacaucguccgggcgcgcgcg

SEQ ID NO: 13174 - RNA, 48 nt, Artificial Sequence
  Description of Artificial Sequence:  Enzymatic Nucleic Acid
uucccuccggaggaaacucccuucaaggacaucguccgggguccgcgc

SEQ ID NO: 13175 - RNA, 48 nt, Artificial Sequence
  Description of Artificial Sequence:  Enzymatic Nucleic Acid
cuucccucggaggaaacucccuucaaggacaucguccgggcguccgcg

SEQ ID NO: 13176 - RNA, 48 nt, Artificial Sequence
  Description of Artificial Sequence:  Enzymatic Nucleic Acid
gcuucccuggaggaaacucccuucaaggacaucguccgggccguccgc

SEQ ID NO: 13177 - RNA, 48 nt, Artificial Sequence
  Description of Artificial Sequence:  Enzymatic Nucleic Acid
acgcuuccggaggaaacucccuucaaggacaucguccgggucccgucc

SEQ ID NO: 13178 - RNA, 48 nt, Artificial Sequence
  Description of Artificial Sequence:  Enzymatic Nucleic Acid
gacgcuucggaggaaacucccuucaaggacaucguccgggcucccguc

SEQ ID NO: 13179 - RNA, 48 nt, Artificial Sequence
  Description of Artificial Sequence:  Enzymatic Nucleic Acid
ggacgcuuggaggaaacucccuucaaggacaucguccgggccucccgu

SEQ ID NO: 13180 - RNA, 48 nt, Artificial Sequence
  Description of Artificial Sequence:  Enzymatic Nucleic Acid
aggggacgggaggaaacucccuucaaggacaucguccggguucccucc

SEQ ID NO: 13181 - RNA, 48 nt, Artificial Sequence
  Description of Artificial Sequence:  Enzymatic Nucleic Acid
ugaggggaggaggaaacucccuucaaggacaucguccggggcuucccu

SEQ ID NO: 13182 - RNA, 48 nt, Artificial Sequence
  Description of Artificial Sequence:  Enzymatic Nucleic Acid
uccaggggggaggaaacucccuucaaggacaucguccgggugagggga

SEQ ID NO: 13183 - RNA, 48 nt, Artificial Sequence
  Description of Artificial Sequence:  Enzymatic Nucleic Acid
agcuccucggaggaaacucccuucaaggacaucguccgggaggggcug

SEQ ID NO: 13184 - RNA, 48 nt, Artificial Sequence
  Description of Artificial Sequence:  Enzymatic Nucleic Acid
cagcuccuggaggaaacucccuucaaggacaucguccgggcaggggcu

SEQ ID NO: 13185 - RNA, 48 nt, Artificial Sequence
  Description of Artificial Sequence:  Enzymatic Nucleic Acid
uccagcucggaggaaacucccuucaaggacaucguccggguccagggg

SEQ ID NO: 13186 - RNA, 48 nt, Artificial Sequence
  Description of Artificial Sequence:  Enzymatic Nucleic Acid
auccagcuggaggaaacucccuucaaggacaucguccgggcuccaggg

SEQ ID NO: 13187 - RNA, 48 nt, Artificial Sequence
  Description of Artificial Sequence:  Enzymatic Nucleic Acid
ugauccagggaggaaacucccuucaaggacaucguccggguccuccag

SEQ ID NO: 13188 - RNA, 48 nt, Artificial Sequence
  Description of Artificial Sequence:  Enzymatic Nucleic Acid
aggugaucggaggaaacucccuucaaggacaucguccgggagcuccuc

SEQ ID NO: 13189 - RNA, 48 nt, Artificial Sequence
  Description of Artificial Sequence:  Enzymatic Nucleic Acid
gaggugauggaggaaacucccuucaaggacaucguccgggcagcuccu

SEQ ID NO: 13190 - RNA, 48 nt, Artificial Sequence
  Description of Artificial Sequence:  Enzymatic Nucleic Acid
gccagcagggaggaaacucccuucaaggacaucguccgggaggaggug

SEQ ID NO: 13191 - RNA, 48 nt, Artificial Sequence
  Description of Artificial Sequence:  Enzymatic Nucleic Acid
agcgccagggaggaaacucccuucaaggacaucguccgggagcaggag

SEQ ID NO: 13192 - RNA, 48 nt, Artificial Sequence
  Description of Artificial Sequence:  Enzymatic Nucleic Acid
aucagcgcggaggaaacucccuucaaggacaucguccgggagcagcag

SEQ ID NO: 13193 - RNA, 48 nt, Artificial Sequence
  Description of Artificial Sequence:  Enzymatic Nucleic Acid
caucagcgggaggaaacucccuucaaggacaucguccgggcagcagca

SEQ ID NO: 13194 - RNA, 48 nt, Artificial Sequence
  Description of Artificial Sequence:  Enzymatic Nucleic Acid
gucaucagggaggaaacucccuucaaggacaucguccggggccagcag

SEQ ID NO: 13195 - RNA, 48 nt, Artificial Sequence
  Description of Artificial Sequence:  Enzymatic Nucleic Acid
acggucauggaggaaacucccuucaaggacaucguccgggagcgccag

SEQ ID NO: 13196 - RNA, 48 nt, Artificial Sequence
  Description of Artificial Sequence:  Enzymatic Nucleic Acid
agcacgguggaggaaacucccuucaaggacaucguccgggaucagcgc

SEQ ID NO: 13197 - RNA, 48 nt, Artificial Sequence
  Description of Artificial Sequence:  Enzymatic Nucleic Acid
gaagagcaggaggaaacucccuucaaggacaucguccgggggucauca

SEQ ID NO: 13198 - RNA, 48 nt, Artificial Sequence
  Description of Artificial Sequence:  Enzymatic Nucleic Acid
gugaagagggaggaaacucccuucaaggacaucguccgggacggucau

SEQ ID NO: 13199 - RNA, 48 nt, Artificial Sequence
  Description of Artificial Sequence:  Enzymatic Nucleic Acid
agagaacaggaggaaacucccuucaaggacaucguccgggauagugaa

SEQ ID NO: 13200 - RNA, 48 nt, Artificial Sequence
  Description of Artificial Sequence:  Enzymatic Nucleic Acid
gcagagaaggaggaaacucccuucaaggacaucguccgggacauagug

SEQ ID NO: 13201 - RNA, 48 nt, Artificial Sequence
  Description of Artificial Sequence:  Enzymatic Nucleic Acid
auuacgggggaggaaacucccuucaaggacaucguccgggagagaaca

SEQ ID NO: 13202 - RNA, 48 nt, Artificial Sequence
  Description of Artificial Sequence:  Enzymatic Nucleic Acid
auaaauuaggaggaaacucccuucaaggacaucguccggggggcagag

SEQ ID NO: 13203 - RNA, 48 nt, Artificial Sequence
  Description of Artificial Sequence:  Enzymatic Nucleic Acid
aguaagcgggaggaaacucccuucaaggacaucguccggggauaaauu

SEQ ID NO: 13204 - RNA, 48 nt, Artificial Sequence
  Description of Artificial Sequence:  Enzymatic Nucleic Acid
auaguaagggaggaaacucccuucaaggacaucguccggggcgauaaa

SEQ ID NO: 13205 - RNA, 48 nt, Artificial Sequence
  Description of Artificial Sequence:  Enzymatic Nucleic Acid
aaaugcucggaggaaacucccuucaaggacaucguccgggauaguaag

SEQ ID NO: 13206 - RNA, 48 nt, Artificial Sequence
  Description of Artificial Sequence:  Enzymatic Nucleic Acid
uaaaugcuggaggaaacucccuucaaggacaucguccgggcauaguaa

SEQ ID NO: 13207 - RNA, 48 nt, Artificial Sequence
  Description of Artificial Sequence:  Enzymatic Nucleic Acid
cuuaaaugggaggaaacucccuucaaggacaucguccggguccauagu

SEQ ID NO: 13208 - RNA, 48 nt, Artificial Sequence
  Description of Artificial Sequence:  Enzymatic Nucleic Acid
uugacaucggaggaaacucccuucaaggacaucguccggguuaaaugc

SEQ ID NO: 13209 - RNA, 48 nt, Artificial Sequence
  Description of Artificial Sequence:  Enzymatic Nucleic Acid
cuugacauggaggaaacucccuucaaggacaucguccgggcuuaaaug

SEQ ID NO: 13210 - RNA, 48 nt, Artificial Sequence
  Description of Artificial Sequence:  Enzymatic Nucleic Acid
cuccuugaggaggaaacucccuucaaggacaucguccgggauccuuaa

SEQ ID NO: 13211 - RNA, 48 nt, Artificial Sequence
  Description of Artificial Sequence:  Enzymatic Nucleic Acid
uuuuucucggaggaaacucccuucaaggacaucguccggguugacauc

SEQ ID NO: 13212 - RNA, 48 nt, Artificial Sequence
  Description of Artificial Sequence:  Enzymatic Nucleic Acid
guuuuucuggaggaaacucccuucaaggacaucguccgggcuugacau

SEQ ID NO: 13213 - RNA, 48 nt, Artificial Sequence
  Description of Artificial Sequence:  Enzymatic Nucleic Acid
cuguuuuuggaggaaacucccuucaaggacaucguccggguccuugac

SEQ ID NO: 13214 - RNA, 48 nt, Artificial Sequence
  Description of Artificial Sequence:  Enzymatic Nucleic Acid
cagaggucggaggaaacucccuucaaggacaucguccggguguuuuuc

SEQ ID NO: 13215 - RNA, 48 nt, Artificial Sequence
  Description of Artificial Sequence:  Enzymatic Nucleic Acid
ucagagguggaggaaacucccuucaaggacaucguccgggcuguuuuu

SEQ ID NO: 13216 - RNA, 48 nt, Artificial Sequence
  Description of Artificial Sequence:  Enzymatic Nucleic Acid
ugcuucuuggaggaaacucccuucaaggacaucguccgggagaggucc

SEQ ID NO: 13217 - RNA, 48 nt, Artificial Sequence
  Description of Artificial Sequence:  Enzymatic Nucleic Acid
uucugcuuggaggaaacucccuucaaggacaucguccggguucagagg

SEQ ID NO: 13218 - RNA, 48 nt, Artificial Sequence
  Description of Artificial Sequence:  Enzymatic Nucleic Acid
gucuucugggaggaaacucccuucaaggacaucguccggguucuucag

SEQ ID NO: 13219 - RNA, 48 nt, Artificial Sequence
  Description of Artificial Sequence:  Enzymatic Nucleic Acid
gaggucuuggaggaaacucccuucaaggacaucguccgggugcuucuu

SEQ ID NO: 13220 - RNA, 48 nt, Artificial Sequence
  Description of Artificial Sequence:  Enzymatic Nucleic Acid
ucggagguggaggaaacucccuucaaggacaucguccggguucugcuu

SEQ ID NO: 13221 - RNA, 48 nt, Artificial Sequence
  Description of Artificial Sequence:  Enzymatic Nucleic Acid
gcaaggcuggaggaaacucccuucaaggacaucguccgggggaggucu

SEQ ID NO: 13222 - RNA, 48 nt, Artificial Sequence
  Description of Artificial Sequence:  Enzymatic Nucleic Acid
ucgcaaggggaggaaacucccuucaaggacaucguccgggucggaggu

SEQ ID NO: 13223 - RNA, 48 nt, Artificial Sequence
  Description of Artificial Sequence:  Enzymatic Nucleic Acid
agaaaucgggaggaaacucccuucaaggacaucguccgggaaggcucg

SEQ ID NO: 13224 - RNA, 48 nt, Artificial Sequence
  Description of Artificial Sequence:  Enzymatic Nucleic Acid
auagaaauggaggaaacucccuucaaggacaucguccggggcaaggcu

SEQ ID NO: 13225 - RNA, 48 nt, Artificial Sequence
  Description of Artificial Sequence:  Enzymatic Nucleic Acid
ugaaaucaggaggaaacucccuucaaggacaucguccgggagauagaa

SEQ ID NO: 13226 - RNA, 48 nt, Artificial Sequence
  Description of Artificial Sequence:  Enzymatic Nucleic Acid
auugaaauggaggaaacucccuucaaggacaucguccgggacagauag

SEQ ID NO: 13227 - RNA, 48 nt, Artificial Sequence
  Description of Artificial Sequence:  Enzymatic Nucleic Acid
aggguccaggaggaaacucccuucaaggacaucguccgggaauugaaa

SEQ ID NO: 13228 - RNA, 48 nt, Artificial Sequence
  Description of Artificial Sequence:  Enzymatic Nucleic Acid
caagggucggaggaaacucccuucaaggacaucguccgggacaauuga

SEQ ID NO: 13229 - RNA, 48 nt, Artificial Sequence
  Description of Artificial Sequence:  Enzymatic Nucleic Acid
ccaaggguggaggaaacucccuucaaggacaucguccgggcacaauug

SEQ ID NO: 13230 - RNA, 48 nt, Artificial Sequence
  Description of Artificial Sequence:  Enzymatic Nucleic Acid
uaaaaaucggaggaaacucccuucaaggacaucguccgggaagggucc

SEQ ID NO: 13231 - RNA, 48 nt, Artificial Sequence
  Description of Artificial Sequence:  Enzymatic Nucleic Acid
auaaaaauggaggaaacucccuucaaggacaucguccgggcaaggguc

SEQ ID NO: 13232 - RNA, 48 nt, Artificial Sequence
  Description of Artificial Sequence:  Enzymatic Nucleic Acid
cuggagauggaggaaacucccuucaaggacaucguccgggugaaaaug

SEQ ID NO: 13233 - RNA, 48 nt, Artificial Sequence
  Description of Artificial Sequence:  Enzymatic Nucleic Acid
ccgaaauaggaggaaacucccuucaaggacaucguccggguggagauc

SEQ ID NO: 13234 - RNA, 48 nt, Artificial Sequence
  Description of Artificial Sequence:  Enzymatic Nucleic Acid
aaaauaucggaggaaacucccuucaaggacaucguccggggaaauacu

SEQ ID NO: 13235 - RNA, 48 nt, Artificial Sequence
  Description of Artificial Sequence:  Enzymatic Nucleic Acid
aaaaauauggaggaaacucccuucaaggacaucguccgggcgaaauac

SEQ ID NO: 13236 - RNA, 48 nt, Artificial Sequence
  Description of Artificial Sequence:  Enzymatic Nucleic Acid
augaaaauggaggaaacucccuucaaggacaucguccggguugugaaa

SEQ ID NO: 13237 - RNA, 48 nt, Artificial Sequence
  Description of Artificial Sequence:  Enzymatic Nucleic Acid
uaagagguggaggaaacucccuucaaggacaucguccggguaaugaaa

SEQ ID NO: 13238 - RNA, 48 nt, Artificial Sequence
  Description of Artificial Sequence:  Enzymatic Nucleic Acid
uccuguacggaggaaacucccuucaaggacaucguccggguaagaggu

SEQ ID NO: 13239 - RNA, 48 nt, Artificial Sequence
  Description of Artificial Sequence:  Enzymatic Nucleic Acid
cuccuguaggaggaaacucccuucaaggacaucguccgggcuaagagg

SEQ ID NO: 13240 - RNA, 48 nt, Artificial Sequence
  Description of Artificial Sequence:  Enzymatic Nucleic Acid
accggcucggaggaaacucccuucaaggacaucguccggguguaccua

SEQ ID NO: 13241 - RNA, 48 nt, Artificial Sequence
  Description of Artificial Sequence:  Enzymatic Nucleic Acid
caccggcuggaggaaacucccuucaaggacaucguccgggcuguaccu

SEQ ID NO: 13242 - RNA, 48 nt, Artificial Sequence
  Description of Artificial Sequence:  Enzymatic Nucleic Acid
ugcaccggggaggaaacucccuucaaggacaucguccggguccuguac

SEQ ID NO: 13243 - RNA, 48 nt, Artificial Sequence
  Description of Artificial Sequence:  Enzymatic Nucleic Acid
ugcugcacggaggaaacucccuucaaggacaucguccgggggcuccug

SEQ ID NO: 13244 - RNA, 48 nt, Artificial Sequence
  Description of Artificial Sequence:  Enzymatic Nucleic Acid
uugcugcaggaggaaacucccuucaaggacaucguccgggcggcuccu

SEQ ID NO: 13245 - RNA, 48 nt, Artificial Sequence
  Description of Artificial Sequence:  Enzymatic Nucleic Acid
aauugcugggaggaaacucccuucaaggacaucguccgggaccggcuc

SEQ ID NO: 13246 - RNA, 48 nt, Artificial Sequence
  Description of Artificial Sequence:  Enzymatic Nucleic Acid
uggaauugggaggaaacucccuucaaggacaucguccgggugcaccgg

SEQ ID NO: 13247 - RNA, 48 nt, Artificial Sequence
  Description of Artificial Sequence:  Enzymatic Nucleic Acid
cuggauucggaggaaacucccuucaaggacaucguccgggauguuagu

SEQ ID NO: 13248 - RNA, 48 nt, Artificial Sequence
  Description of Artificial Sequence:  Enzymatic Nucleic Acid
acuggauuggaggaaacucccuucaaggacaucguccgggcauguuag

SEQ ID NO: 13249 - RNA, 48 nt, Artificial Sequence
  Description of Artificial Sequence:  Enzymatic Nucleic Acid
gucacagaggaggaaacucccuucaaggacaucguccggguggauucc

SEQ ID NO: 13250 - RNA, 48 nt, Artificial Sequence
  Description of Artificial Sequence:  Enzymatic Nucleic Acid
cacugucaggaggaaacucccuucaaggacaucguccgggagacugga

SEQ ID NO: 13251 - RNA, 48 nt, Artificial Sequence
  Description of Artificial Sequence:  Enzymatic Nucleic Acid
aacacuguggaggaaacucccuucaaggacaucguccgggacagacug

SEQ ID NO: 13252 - RNA, 48 nt, Artificial Sequence
  Description of Artificial Sequence:  Enzymatic Nucleic Acid
gaaaaacaggaggaaacucccuucaaggacaucguccgggugucacag

SEQ ID NO: 13253 - RNA, 48 nt, Artificial Sequence
  Description of Artificial Sequence:  Enzymatic Nucleic Acid
gugaaaaaggaggaaacucccuucaaggacaucguccgggacugucac

SEQ ID NO: 13254 - RNA, 48 nt, Artificial Sequence
  Description of Artificial Sequence:  Enzymatic Nucleic Acid
gcuuaccaggaggaaacucccuucaaggacaucguccgggagagugaa

SEQ ID NO: 13255 - RNA, 48 nt, Artificial Sequence
  Description of Artificial Sequence:  Enzymatic Nucleic Acid
cagcuuacggaggaaacucccuucaaggacaucguccgggacagagug

SEQ ID NO: 13256 - RNA, 48 nt, Artificial Sequence
  Description of Artificial Sequence:  Enzymatic Nucleic Acid
ucagcuuaggaggaaacucccuucaaggacaucguccgggcacagagu

SEQ ID NO: 13257 - RNA, 48 nt, Artificial Sequence
  Description of Artificial Sequence:  Enzymatic Nucleic Acid
uuccucagggaggaaacucccuucaaggacaucguccggguuaccaca

SEQ ID NO: 13258 - RNA, 48 nt, Artificial Sequence
  Description of Artificial Sequence:  Enzymatic Nucleic Acid
auauuccuggaggaaacucccuucaaggacaucguccgggagcuuacc

SEQ ID NO: 13259 - RNA, 48 nt, Artificial Sequence
  Description of Artificial Sequence:  Enzymatic Nucleic Acid
acauauucggaggaaacucccuucaaggacaucguccgggucagcuua

SEQ ID NO: 13260 - RNA, 48 nt, Artificial Sequence
  Description of Artificial Sequence:  Enzymatic Nucleic Acid
gacauauuggaggaaacucccuucaaggacaucguccgggcucagcuu

SEQ ID NO: 13261 - RNA, 48 nt, Artificial Sequence
  Description of Artificial Sequence:  Enzymatic Nucleic Acid
aaaugugaggaggaaacucccuucaaggacaucguccgggauauuccu

SEQ ID NO: 13262 - RNA, 48 nt, Artificial Sequence
  Description of Artificial Sequence:  Enzymatic Nucleic Acid
uucuuugaggaggaaacucccuucaaggacaucguccgggugaaaaug

SEQ ID NO: 13263 - RNA, 15 nt, Artificial Sequence
  Definition of Artificial Sequence:  Nucleic Acid Substrate
  misc_feature (1)..(6): n stands for any a, g, c, or u
  misc_feature (9)..(15): n stands for any a, g, c, or u
nnnnnnuhnnnnnnn

SEQ ID NO: 13264 - RNA, 36 nt, Artificial Sequence
  Definition of Artificial Sequence:  Enzymatic Nucleic Acid
  misc_feature (1)..(7): n stands for any a, g, c, or u
  misc_feature (16)..(18): n stands for any a, g, c, or u
  misc_feature (23)..(25): n stands for any a, g, c, or u
  misc_feature (31)..(36): n stands for any a, g, c, or u
  misc_feature (1)..(8): 2'-O-methyl
  misc_feature (12)..(12): 2'-O-methyl
  misc_feature (14)..(26): 2'-O-methyl
  misc_feature (28)..(29): 2'-O-methyl
  misc_feature (31)..(36): 2'-O-methyl
  misc_feature (9)..(9): 2'-deoxy-2'-C-allyl
nnnnnnncugaugagnnngaaannncgaaannnnnn

SEQ ID NO: 13265 - RNA, 14 nt, Artificial Sequence
  Definition of Artificial Sequence:  Nucleic Acid Substrate
  misc_feature (1)..(5): n stands for any a, g, c, or u
  misc_feature (8)..(14): n stands for any a, g, c, or u
nnnnnchnnnnnnn

SEQ ID NO: 13266 - RNA, 35 nt, Artificial Sequence
  Definition of Artificial Sequence:  Enzymatic Nucleic Acid
  misc_feature (1)..(7): n stands for any a, g, c, or u
  misc_feature (16)..(18): n stands for any a, g, c, or u
  misc_feature (23)..(25): n stands for any a, g, c, or u
  misc_feature (31)..(35): n stands for any a, g, c, or u
  misc_feature (1)..(8): 2'-O-methyl
  misc_feature (12)..(12): 2'-O-methyl
  misc_feature (14)..(26): 2'-O-methyl
  misc_feature (28)..(29): 2'-O-methyl
  misc_feature (31)..(35): 2'-O-methyl
  misc_feature (9)..(9): 2'-deoxy-2'-C-allyl
  misc_feature (30)..(30): n stands for Inosine
nnnnnnncugaugagnnngaaannncgaannnnnn

SEQ ID NO: 13267 - RNA, 15 nt, Artificial Sequence
  Definition of Artificial Sequence:  Nucleic Acid Substrate
  misc_feature (1)..(6): n stands for any a, g, c, or u
  misc_feature (9)..(15): n stands for any a, g, c, or u
nnnnnnygnnnnnnn

SEQ ID NO: 13268 - RNA, 35 nt, Artificial Sequence
  Definition of Artificial Sequence:  Enzymatic Nucleic Acid
  misc_feature (1)..(7): n stands for any a, g, c, or u
  misc_feature (30)..(35): n stands for any a, g, c, or u
  misc_feature (1)..(8): 2'-O-methyl
  misc_feature (13)..(16): 2'-O-methyl
  misc_feature (18)..(35): 2'-O-methyl
  misc_feature (11)..(11): phosphorothioate 3'-internucleotide linkage
nnnnnnnugauggcaugcacuaugcgcgnnnnnnn

SEQ ID NO: 13269 - RNA, 48 nt, Artificial Sequence
  Definition of Artificial Sequence:  Enzymatic Nucleic Acid
  misc_feature (1)..(8): 2'-O-methyl
  misc_feature (12)..(21): 2'-O-methyl
  misc_feature (32)..(37): 2'-O-methyl
  misc_feature (44)..(48): 2'-O-methyl
  misc_feature (9)..(10): 2'-deoxy-2'-amino
  misc_feature (22)..(26): 2'-deoxy-2'-amino
  misc_feature (38)..(40): 2'-deoxy-2'-amino
gugugcaaccggaggaaacucccuucaaggacgaaaguccgggacggg

SEQ ID NO: 13270 - RNA, 16 nt, Homo sapiens
gccguggguugcacac

SEQ ID NO: 13271 - RNA, 35 nt, Artificial Sequence
  Definition of Artificial Sequence:  Enzymatic Nucleic Acid
  misc_feature (1)..(4): phosphorothioate 3'-internucleotide linkage
  misc_feature (1)..(7): 2'-O-methyl
  misc_feature (9)..(15): 2'-O-methyl
  misc_feature (19)..(19): 2'-O-methyl
  misc_feature (21)..(21): 2'-O-methyl
  misc_feature (23)..(23): 2'-O-methyl
  misc_feature (26)..(26): 2'-O-methyl
  misc_feature (28)..(35): 2'-O-methyl
  misc_feature (17)..(17): 2'-deoxy-2'-amino
  misc_feature (27)..(27): 2'-deoxy-2'-amino
  misc_feature (35)..(35): 3'-3 attached terminal deoxyabasic moeity
gugccuggccgaaaggcgagugaggucugccgcgc

SEQ ID NO: 13272 - RNA, 15 nt, Homo sapiens
gcgcggcgcaggcac

SEQ ID NO: 13273 - DNA, 16 bp, Artificial Sequence
  Definition of Artificial Sequence:  Enzymatic Nucleic Acid
rggctagctacaacga

SEQ ID NO: 13274 - RNA, 10 nt, Artificial Sequence
  Description of Artificial Sequence:  Enzymatic Nucleic Acid Stem Loop
gccguuaggc

What we claim is:

1. A nucleic acid molecule that down regulates expression or inhibits function of a receptor for a neurite growth inhibitor.

2. A nucleic acid molecule of claim 1, wherein the receptor is a NOGO receptor.

3. The nucleic acid of claim 1, wherein said nucleic acid molecule is adapted for use to treat conditions selected from the group consisting of CNS injury, spinal cord injury, and cerebrovascular accident.

4. The nucleic acid molecule of claim 1 or claim 2, wherein said nucleic acid molecule is an enzymatic nucleic acid molecule having at least one binding arm.

5. The nucleic acid molecule of claim 4, wherein said enzymatic nucleic acid molecule has an endonuclease activity to cleave RNA encoded by a NOGO receptor gene.

6. The nucleic acid of claim 4, wherein the at least one binding arm of the enzymatic nucleic acid molecule comprises a sequence complementary to a sequence selected from the group consisting of SEQ ID NOs. 1-1023.

7. An enzymatic nucleic acid molecule comprising a sequence selected from the group consisting of SEQ ID NOs. 5484-7055.

8. The nucleic acid molecule of claim 1, wherein said nucleic acid molecule is an antisense nucleic acid molecule.

9. An antisense nucleic acid molecule comprising a sequence complementary to a sequence selected from the group consisting of SEQ ID NOs. 1-1023.

10. The enzymatic nucleic acid molecule of claim 4, wherein said enzymatic nucleic acid molecule is in a hammerhead (HH) motif.

11. The enzymatic nucleic acid molecule of claim 4, wherein said enzymatic nucleic acid molecule is in a hairpin, hepatitis Delta virus, group I intron, VS nucleic acid, amberzyme, zinzyme or RNAse P nucleic acid motif.

12. The enzymatic nucleic acid molecule of claim 11, wherein said zinzyme motif comprises a sequence selected from the group consisting of SEQ ID NOs. 6030-6272.

13. The enzymatic nucleic acid molecule of claim 11, wherein said amberzyme motif comprises a sequence selected from the group consisting of SEQ ID NOs. 6630-7055.

14. The enzymatic nucleic acid molecule of claim 4, wherein said enzymatic nucleic acid molecule is in a NCH motif.

15. The enzymatic nucleic acid molecule of claim 4, wherein said enzymatic nucleic acid molecule is in a G-cleaver motif.

16. The enzymatic nucleic acid molecule of claim 4, wherein said enzymatic nucleic acid molecule is a DNAzyme.

17. The nucleic acid molecule of claim 2, wherein said nucleic acid molecule comprises between 12 and 100 bases complementary to RNA encoded by a NOGO receptor gene.

18. The nucleic acid molecule of claim 2, wherein said nucleic acid molecule comprises between 14 and 24 bases complementary to the RNA encoded by a NOGO receptor gene.

19. The nucleic acid molecule of claim 1, wherein said nucleic acid molecule is chemically synthesized.

20. The nucleic acid molecule of claim 1, wherein said nucleic acid molecule comprises at least one 2′-sugar modification.

21. The nucleic acid molecule of claim 1, wherein said nucleic acid molecule comprises at least one nucleic acid base modification.

22. The nucleic acid molecule of claim 1, wherein said nucleic acid molecule comprises at least one phosphate backbone modification.

23. A mammalian cell comprising the nucleic acid molecule of claim 1.

24. The mammalian cell of claim 23, wherein said mammalian cell is a human cell.

25. A method of reducing NOGO receptor activity in a cell, comprising the step of contacting said cell with the nucleic acid molecule of claim 2, under conditions suitable for said inhibition.

26. A method of treatment of a patient having a condition associated with levels of a NOGO receptor, comprising contacting cells of said patient with the nucleic acid molecule of claim 2, under conditions suitable for said treatment.

27. The method of claim 26 further comprising the use of one or more drug therapies under conditions suitable for said treatment.

28. A method of cleaving RNA encoded by a NOGO receptor gene comprising contacting the nucleic acid molecule of claim 2 with said RNA under conditions suitable for the cleavage of said RNA.

29. The method of claim 28, wherein said cleavage is carried out in the presence of a divalent cation.

30. The method of claim 29, wherein said divalent cation is Mg²⁺.

31. The nucleic acid molecule of claim 1, wherein said nucleic acid comprises a cap structure, wherein the cap structure is at the 5′-end, 3′-end, or both the 5′-end and the 3′-end.

32. The enzymatic nucleic acid molecule of claim 10, wherein said hammerhead motif comprises a sequence selected from the group consisting of SEQ ID NOs. 5484-5583.

33. The enzymatic nucleic acid molecule of claim 14, wherein said NCH motif comprises a sequence selected from the group consisting of SEQ ID NOs. 5584-6029.

34. The enzymatic nucleic acid molecule of claim 16, wherein said DNAzyme comprises a sequence selected from the group consisting of SEQ ID NOs. 6273-6629.

35. The method of claim 25, wherein said nucleic acid molecule is in a hammerhead motif.

36. The method of claim 25, wherein said nucleic acid molecule is a DNAzyme.

37. An expression vector comprising at least one nucleic acid molecule of claim 1 in a manner that allows expression of the nucleic acid molecule.

38. A mammalian cell comprising an expression vector of claim 37.

39. The mammalian cell of claim 38, wherein said mammalian cell is a human cell.

40. The expression vector of claim 37, wherein said expression vector encodes a nucleic acid molecule having a hammerhead motif.

41. The expression vector of claim 37, wherein said expression vector further comprises a sequence for an antisense nucleic acid molecule complementary to RNA encoded by a NOGO receptor gene.

42. The expression vector of claim 37, wherein said expression vector comprises a two or more of said nucleic acid molecules, which can be the same or different.

43. The expression vector of claim 42, wherein said expression vector comprises a sequence encoding an antisense nucleic acid molecule complementary to RNA encoded by a NOGO receptor gene.

44. A method for treatment of conditions selected from the group consisting of CNS injury and cerebrovascular accident comprising the step of administering to a patient the nucleic acid molecule of claim 1 under conditions suitable for said treatment.

45. The method of claim 44, wherein said treatment of CNS injury is treatment of spinal cord injury.

46. A method for treatment of conditions selected from the group consisting of CNS injury and cerebrovascular accident comprising the step of administering to a patient the antisense nucleic acid molecule of claim 9 under conditions suitable for said treatment.

47. The method of claim 44, wherein said nucleic acid molecule is in a hammerhead motif.

48. The method of claim 44, wherein said method further comprises administering to said patient one or more other therapies.

49. The nucleic acid molecule of claim 1, wherein said nucleic acid molecule comprises at least five ribose residues, at least ten 2′-O-methyl modifications, and a 3′-end modification.

50. The nucleic acid molecule of claim 49, wherein said nucleic acid molecule further comprises phosphorothioate linkages on at least three of the 5′ terminal nucleotides.

51. The nucleic acid molecule of claim 49, wherein said 3′-end modification is 3′-3′ inverted abasic moiety.

52. The enzymatic nucleic acid molecule of claim 16, wherein said DNAzyme comprises at least ten 2′-O-methyl modifications and a 3′-end modification.

53. The enzymatic nucleic acid molecule of claim 52, wherein said DNAzyme further comprises phosphorothioate linkages on at least three of the 5′ terminal nucleotides.

54. The enzymatic nucleic acid molecule of claim 52, wherein said 3′-end modification is 3′-3′ inverted abasic moiety.

55. An enzymatic nucleic acid molecule that down regulates expression of a nucleic acid molecule encoding an IkappaB kinase (IKK) subunit.

56. An enzymatic nucleic acid molecule that down regulates expression of a nucleic acid molecule encoding protein kinase PKR.

57. An enzymatic nucleic acid molecule comprising a sequence selected from the group consisting of SEQ ID NOs. 7056-11665.

58. An enzymatic nucleic acid molecule comprising at least one binding arm wherein one or more of said binding arms comprises a sequence complementary to a sequence selected from the group consisting of SEQ ID NOs. 1024-4414.

59. An antisense nucleic acid molecule comprising a sequence complementary to a sequence selected from the group consisting of SEQ ID NOs. 1024-4414.

60. The enzymatic nucleic acid molecule of any of claims 55-58, wherein said enzymatic nucleic acid molecule is adapted to treat cancer.

61. The antisense nucleic acid molecule of claim 59, wherein said antisense nucleic acid molecule is adapted to treat cancer.

62. The enzymatic nucleic acid molecule of any of claims 55-58, wherein said enzymatic nucleic acid molecule has an endonuclease activity to cleave RNA encoded by a IKK-gamma gene or PKR gene.

63. The enzymatic nucleic acid molecule of claim 55 or claim 56, wherein said enzymatic nucleic acid molecule is in an Inozyme configuration.

64. The enzymatic nucleic acid molecule of claim 55 or claim 56, wherein said enzymatic nucleic acid molecule is in a Zinzyme configuration.

65. The enzymatic nucleic acid molecule of claim 55 or claim 56, wherein said enzymatic nucleic acid molecule is in a G-cleaver configuration.

66. The enzymatic nucleic acid molecule of claim 55 or claim 56, wherein said enzymatic nucleic acid molecule is in an Amberzyme configuration.

67. The enzymatic nucleic acid molecule of claim 55 or claim 56, wherein said enzymatic nucleic acid molecule is in a DNAzyme configuration.

68. The enzymatic nucleic acid molecule of claim 55 or claim 56, wherein said enzymatic nucleic acid molecule is in a Hammerhead configuration.

69. The enzymatic nucleic acid molecule of claim 63, wherein said Inozyme comprises a sequence complementary to a sequence selected from the group consisting of SEQ ID NOs. 1218-1721 and 3051-3549.

70. The enzymatic nucleic acid molecule of claim 63, wherein said Inozyme comprises a sequence selected from the group consisting of SEQ ID NOs. 7250-7753 and 9701-10199.

71. The enzymatic nucleic acid molecule of claim 64, wherein said Zinzyme comprises a sequence complementary to a sequence selected from the group consisting of SEQ ID NOs. 1722-1998 and 3550-3768.

72. The enzymatic nucleic acid molecule of claim 64, wherein said Zinzyme comprises a sequence selected from the group consisting of SEQ ID NOs 7754-8030 and 10200-10418.

73. The enzymatic nucleic acid molecule of claim 66, wherein said Amberzyme comprises a sequence selected from the group consisting of SEQ ID NOs 8441-9069 and 11001-11547.

74. The enzymatic nucleic acid molecule of claim 67, wherein said DNAzyme comprises a sequence selected from the group consisting of SEQ ID NOs 8031-8440 and 10419-11000.

75. The enzymatic nucleic acid molecule of claim 68, wherein said Hammerhead comprises a sequence complementary to a sequence selected from the group consisting of SEQ ID NOs. 1024-1217 and 2420-3050.

76. The enzymatic nucleic acid molecule of claim 68, wherein said Hammerhead comprises a sequence selected from the group consisting of SEQ ID NOs 7056-7249 and 9070-9700.

77. The enzymatic nucleic acid molecule of any of claims 55-58, wherein said enzymatic nucleic acid molecule comprises between 12 and 100 bases complementary to RNA encoded by an IKK-gamma gene or PKR gene.

78. The enzymatic nucleic acid molecule of any of claims 55-58, wherein said enzymatic nucleic acid molecule comprises between 14 and 24 bases complementary to RNA encoded by an IKK-gamma gene or PKR gene.

79. The enzymatic nucleic acid molecule of any of claims 55-58 wherein said enzymatic nucleic acid molecule is chemically synthesized.

80. The antisense nucleic acid molecule of claim 59, wherein said antisense nucleic acid molecule is chemically synthesized.

81. The enzymatic nucleic acid molecule of any of claims 55-58, wherein said enzymatic nucleic acid molecule comprises at least one 2′-sugar modification.

82. The antisense nucleic acid molecule of claim 59, wherein said antisense nucleic acid molecule comprises at least one 2′-sugar modification.

83. The enzymatic nucleic acid molecule of any of claims 55-58, wherein said enzymatic nucleic acid molecule comprises at least one nucleic acid base modification.

84. The antisense nucleic acid molecule of claim 59, wherein said antisense nucleic acid molecule comprises at least one nucleic acid base modification.

85. The enzymatic nucleic acid molecule of any of claims 55-58, wherein said enzymatic nucleic acid molecule comprises at least one phosphate backbone modification.

86. The antisense nucleic acid molecule of claim 59, wherein said antisense nucleic acid molecule comprises at least one phosphate backbone modification.

87. A mammalian cell including the enzymatic nucleic acid molecule of any of claims 55-58.

88. The mammalian cell of claim 87, wherein said mammalian cell is a human cell.

89. A method of down-regulating PKR activity in a cell, comprising contacting said cell with the enzymatic nucleic acid molecule of claim 56, under conditions suitable for down-regulating of PKR activity.

90. A method of treatment of a patient having a condition associated with the level of PKR, comprising contacting cells of said patient with the enzymatic nucleic acid molecule of any of claims 55-59, under conditions suitable for said treatment.

91. A method of down-regulating IKK-gamma activity in a cell, comprising contacting said cell with the enzymatic nucleic acid molecule of any of claims 55-59, under conditions suitable for down-regulating of IKK-gamma activity.

92. A method of treatment of a patient having a condition associated with the level of IKK-gamma, comprising contacting cells of said patient with the enzymatic nucleic acid molecule of any of claims 55-59, under conditions suitable for said treatment.

93. The method of claim 89 further comprising the use of one or more drug therapies under conditions suitable for said treatment.

94. The method of claim 90 further comprising the use of one or more drug therapies under conditions suitable for said treatment.

95. The method of claim 91 further comprising the use of one or more drug therapies under conditions suitable for said treatment.

96. The method of claim 92 further comprising the use of one or more drug therapies under conditions suitable for said treatment.

97. A method of cleaving RNA encoded by a PKR gene comprising contacting an enzymatic nucleic acid molecule of claim 56 with said RNA under conditions suitable for the cleavage.

98. A method of cleaving RNA encoded by an IKK-gamma gene comprising contacting an enzymatic nucleic acid molecule of claim 55 with said RNA under conditions suitable for the cleavage.

99. The method of claim 98, wherein said cleavage is carried out in the presence of a divalent cation.

100. The method of claim 99, wherein said cleavage is carried out in the presence of a divalent cation.

101. The method of claim 100, wherein said divalent cation is Mg²⁺.

102. The method of claim 101, wherein said divalent cation is Mg²⁺.

103. The enzymatic nucleic acid molecule of any of claims 55-58, wherein said enzymatic nucleic acid comprises a cap structure, wherein the cap structure is at the 5′-end, the 3′-end, or both the 5′-end and the 3′-end.

104. The antisense nucleic acid molecule of claim 59, wherein said antisense nucleic acid comprises a cap structure, wherein the cap structure is at the 5′-end, the 3′-end, or both the 5′-end and the 3′-end.

105. The enzymatic nucleic acid molecule of claim 103, wherein the cap structure at the 5′-end, 3′-end, or both the 5′-end and the 3′-end comprises a 3′,3′-linked or 5′,5′-linked deoxyabasic ribose derivative.

106. The antisense nucleic acid molecule of claim 104, wherein the cap structure at the 5′-end, 3′-end, or both the 5′-end and the 3′-end comprises a 3′,3′-linked or 5′,5′-linked deoxyabasic ribose derivative.

107. The method of claim 89, wherein said enzymatic nucleic acid molecule is in a Zinzyme configuration.

108. An expression vector comprising at least one enzymatic nucleic acid molecule of claim 55 or claim 56 in a manner that allows expression of the nucleic acid molecule.

109. A mammalian cell comprising the expression vector of claim 108.

110. The mammalian cell of claim 109, wherein said mammalian cell is a human cell.

111. The expression vector of claim 108, wherein said enzymatic nucleic acid molecule is in a hammerhead configuration. (DOES THIS MAKE SENSE?)

112. The expression vector of claim 108, wherein said expression vector further comprises a sequence for an antisense nucleic acid molecule complementary to RNA encoded by an IKK-gamma subunit gene or PKR gene.

113. The expression vector of claim 108, wherein said expression vector comprises a nucleic acid sequence encoding two or more of said enzymatic nucleic acid molecules, which can be the same or different.

114. The expression vector of claim 108, wherein said expression vector further comprises a sequence encoding an antisense nucleic acid molecule complementary to RNA encoded by an IKK-gamma gene or PKR gene.

115. A method for treatment of cancer comprising administering to a patient the enzymatic nucleic acid molecule of any of claims 55-58 under conditions suitable for said treatment.

116. The method of claim 115, wherein said cancer is breast cancer, lung cancer, prostate cancer, colorectal cancer, brain cancer, esophageal cancer, stomach cancer, bladder cancer, pancreatic cancer, cervical cancer, head and neck cancer, ovarian cancer, melanoma, lymphoma, glioma, or multidrug resistant cancer.

117. A method for treatment of cancer comprising administering to a patient the antisense nucleic acid molecule of claim 59 under conditions suitable for said treatment.

118. The method of claim 117, wherein said cancer is breast cancer, lung cancer, prostate cancer, colorectal cancer, brain cancer, esophageal cancer, stomach cancer, bladder cancer, pancreatic cancer, cervical cancer, head and neck cancer, ovarian cancer, melanoma, lymphoma, glioma, or multidrug resistant cancer.

119. The method of claim 115, wherein said enzymatic nucleic acid molecule is in a Zinzyme configuration.

120. The method of claim 115, wherein said method further comprises administering to said patient one or more other therapies.

121. The method of claim 117, wherein said method further comprises administering to said patient one or more other therapies.

122. The nucleic acid molecule of any of claims 55, 56, or 58, wherein said nucleic acid molecule comprises at least five ribose residues, at least ten 2′-O-methyl modifications, and a 3′-end modification.

123. The nucleic acid molecule of claim 122, wherein said nucleic acid molecule further comprises phosphorothioate linkages on at least three of the 5′ terminal nucleotides.

124. The nucleic acid molecule of claim 122, wherein said 3′-end modification is a 3′-3′ inverted abasic moiety.

125. The method of claim 93 wherein said other drug therapies are monoclonal antibodies, IKK-gamma or PKR-specific inhibitors, chemotherapy, or radiation therapy.

126. The method of claim 125, wherein said chemotherapy is paclitaxel, docetaxel, cisplatin, methotrexate, cyclophosphamide, doxorubin, fluorouracil carboplatin, edatrexate, gemcitabine, or vinorelbine.

127. The method of claim 94 wherein said other drug therapies are monoclonal antibodies, IKK-gamma or PKR-specific inhibitors, chemotherapy, or radiation therapy.

128. The method of claim 127, wherein said chemotherapy is paclitaxel, docetaxel, cisplatin, methotrexate, cyclophosphamide, doxorubin, fluorouracil carboplatin, edatrexate, gemcitabine, or vinorelbine.

129. The method of claim 95 wherein said other drug therapies are monoclonal antibodies, IKK-gamma or PKR-specific inhibitors, chemotherapy, or radiation therapy.

130. The method of claim 129, wherein said chemotherapy is paclitaxel, docetaxel, cisplatin, methotrexate, cyclophosphamide, doxorubin, fluorouracil carboplatin, edatrexate, gemcitabine, or vinorelbine.

131. The method of claim 96 wherein said other drug therapies are monoclonal antibodies, IKK-gamma or PKR-specific inhibitors, chemotherapy, or radiation therapy.

132. The method of claim 131, wherein said chemotherapy is paclitaxel, docetaxel, cisplatin, methotrexate, cyclophosphamide, doxorubin, fluorouracil carboplatin, edatrexate, gemcitabine, or vinorelbine.

133. The method of claim 120, wherein said other therapies are monoclonal antibodies, IKK-gamma or PKR-specific inhibitors, chemotherapy, or radiation therapy.

134. The method of claim 133, wherein said chemotherapy is paclitaxel, docetaxel, cisplatin, methotrexate, cyclophosphamide, doxorubin, fluorouracil carboplatin, edatrexate, gemcitabine, or vinorelbine.

135. The method of claim 121, wherein said other therapies are monoclonal antibodies, IKK-gamma or PKR-specific inhibitors, chemotherapy, or radiation therapy.

136. The method of claim 135, wherein said chemotherapy is paclitaxel, docetaxel, cisplatin, methotrexate, cyclophosphamide, doxorubin, fluorouracil carboplatin, edatrexate, gemcitabine, or vinorelbine.

137. A method for treatment of an inflammatory disease comprising the step of administering to a patient the enzymatic nucleic acid molecule of any of claims 55-58 under conditions suitable for said treatment.

138. The method of claim 137, wherein said inflammatory disease is rheumatoid arthritis, restenosis, asthma, Crohn's disease, diabetes, obesity, autoimmune disease, lupus, multiple sclerosis, transplant/graft rejection, gene therapy applications, ischemia/reperfusion injury, glomerulonephritis, sepsis, allergic airway inflammation, inflammatory bowel disease, or infection.

139. A method for treatment of an inflammatory disease comprising the step of administering to a patient the antisense nucleic acid molecule of claim 59 under conditions suitable for said treatment.

140. The method of claim 139, wherein said inflammatory disease is rheumatoid arthritis, restenosis, asthma, Crohn's disease, diabetes, obesity, autoimmune disease, lupus, multiple sclerosis, transplant/graft rejection, gene therapy applications, ischemia/reperfusion injury (CNS and myocardial), glomerulonephritis, sepsis, allergic airway inflammation, inflammatory bowel disease, or infection.

141. The method of claim 137, wherein said enzymatic nucleic acid molecule is in a Zinzyme configuration.

142. The method of claim 137, wherein said method further comprises administering to said patient one or more other therapies.

143. The method of claim 139, wherein said method further comprises administering to said patient one or more other therapies.

144. A pharmaceutical composition comprising an enzymatic nucleic acid molecule of any of claims 55-58 in a pharmaceutically acceptable carrier.

145. A pharmaceutical composition comprising an antisense nucleic acid molecule of claim 59 in a pharmaceutically acceptable carrier.

146. The enzymatic nucleic acid molecule of claim 55, wherein said subunit of IKK-is IKK-gamma.

147. The enzymatic nucleic acid molecule of claim 55, wherein said subunit of IKK-is IKK-alpha.

148. The enzymatic nucleic acid molecule of claim 55, wherein said subunit of IKK-is IKK-beta.

149. A method of administering to a cell an enzymatic nucleic acid molecule of any of claims 55-57 comprising contacting said cell with the enzymatic nucleic acid molecule under conditions suitable for said administration.

150. The method of claim 149, wherein said cell is a mammalian cell.

151. The method of claim 149, wherein said cell is a human cell.

152. The method of claim 149, wherein said administration is in the presence of a delivery reagent.

153. The method of claim 152, wherein said delivery reagent is a lipid.

154. The method of claim 153, wherein said lipid is a cationic lipid.

155. The method of claim 153, wherein said lipid is a phospholipid.

156. The method of claim 152, wherein said delivery reagent is a liposome.

157. A nucleic acid molecule that down regulates expression of a prostaglandin D2 receptor (PTGDR) gene.

158. The nucleic acid molecule of claim 157, wherein said nucleic acid molecule is an enzymatic nucleic acid molecule.

159. The nucleic acid molecule of claim 157, wherein said nucleic acid molecule is an antisense nucleic acid molecule.

160. The enzymatic nucleic acid molecule of claim 158, wherein said enzymatic nucleic acid molecule comprises a sequence selected from the group of sequences consisting of SEQ ID NOs: 11666-13262.

161. The enzymatic nucleic acid molecule of claim 158, wherein said enzymatic nucleic acid molecule comprises at least one binding arm wherein the at least one binding arm comprises a sequence complementary to a sequence selected from the group of sequences consisting of SEQ ID NOs: 4415-5483.

162. The antisense nucleic acid molecule of claim 159, wherein said antisense nucleic acid molecule comprises a sequence complementary to a sequence selected from the group of sequences consisting of SEQ ID NOs: 4415-5483.

163. The nucleic acid molecule of claim 157, wherein said nucleic acid molecule is adapted to treat asthma.

164. The enzymatic nucleic acid molecule of any of claims 158, 160 or 161, wherein said enzymatic nucleic acid molecule has an endonuclease activity to cleave RNA encoded by a PTGDR gene.

165. The enzymatic nucleic acid molecule of claim 157, wherein said enzymatic nucleic acid molecule is in a hammerhead configuration.

166. The enzymatic nucleic acid molecule of claim 157, wherein said enzymatic nucleic acid molecule is in an Inozyme configuration.

167. The enzymatic nucleic acid molecule of claim 157, wherein said enzymatic nucleic acid molecule is in a Zinzyme configuration.

168. The enzymatic nucleic acid molecule of claim 157, wherein said enzymatic nucleic acid molecule is in a DNAzyme configuration.

169. The enzymatic nucleic acid molecule of claim 157, wherein said enzymatic nucleic acid molecule is in a G-cleaver configuration.

170. The enzymatic nucleic acid molecule of claim 157, wherein said enzymatic nucleic acid molecule is in an Amberzyme configuration.

171. The enzymatic nucleic acid molecule of claim 165, wherein said hammerhead configuration comprises a sequence complementary to a sequence selected from the group of sequences consisting of SEQ ID NOs: 4415-4641.

172. The enzymatic nucleic acid molecule of claim 165, wherein said hammerhead configuration comprises a sequence selected from the group of sequences consisting of SEQ ID NOs: 11666-11892.

173. The enzymatic nucleic acid molecule of claim 166, wherein said Inozyme configuration comprises a sequence complementary to a sequence selected from the group of sequences consisting of SEQ ID NOs: 4642-5017.

174. The enzymatic nucleic acid molecule of claim 166, wherein said Inozyme configuration comprises a sequence selected from the group of sequences consisting of SEQ ID NOs: 11893-12268.

175. The enzymatic nucleic acid molecule of claim 167, wherein said Zinzyme configuration comprises a sequence complementary to a sequence selected from the group of sequences consisting of SEQ ID NOs: 5018-5248.

176. The enzymatic nucleic acid molecule of claim 167, wherein said Zinzyme configuration comprises a sequence selected from the group of sequences consisting of SEQ ID NOs: 12269-12499.

177. The enzymatic nucleic acid molecule of claim 168, wherein said DNAzyme configuration comprises a sequence complementary to a sequence selected from the group of sequences consisting of SEQ ID NOs: 4415-5294.

178. The enzymatic nucleic acid molecule of claim 168, wherein said DNAzyme configuration comprises a sequence selected from the group of sequences consisting of SEQ ID NOs: 12500-12842.

179. The enzymatic nucleic acid molecule of claim 170, wherein said Amberzyme configuration comprises a sequence complementary to a sequence selected from the group of sequences consisting of SEQ ID NOs: 5018-5248, and 5295-5483.

180. The enzymatic nucleic acid molecule of claim 170, wherein said Amberzyme configuration comprises a sequence selected from the group of sequences consisting of SEQ ID NOs: 12843-13262.

181. The enzymatic nucleic acid molecule of any of claims 158, 160 or 161, wherein said enzymatic nucleic acid molecule comprises between 8 and 100 bases complementary to a RNA molecule encoded by a PTGDR gene.

182. The enzymatic nucleic acid molecule of any of claims 158, 160 or 161, wherein said enzymatic nucleic acid molecule comprises between 14 and 24 bases complementary to a RNA molecule encoded by a PTGDR gene.

183. The enzymatic nucleic acid molecule of any of claims 158, 160 or 161, wherein said enzymatic nucleic acid molecule is chemically synthesized.

184. The antisense nucleic acid molecule of claim 159, wherein said antisense nucleic acid molecule is chemically synthesized.

185. The enzymatic nucleic acid molecule of any of claims 158, 160 or 161, wherein said enzymatic nucleic acid molecule comprises at least one 2′-sugar modification.

186. The antisense nucleic acid molecule of claim 159, wherein said antisense nucleic acid molecule comprises at least one 2′-sugar modification.

187. The enzymatic nucleic acid molecule of any of claims 158, 160 or 161, wherein said enzymatic nucleic acid molecule comprises at least one nucleic acid base modification.

188. The antisense nucleic acid molecule of claim 159, wherein said antisense nucleic acid molecule comprises at least one nucleic acid base modification.

189. The enzymatic nucleic acid molecule of any of claims 158, 160 or 161, wherein said enzymatic nucleic acid molecule comprises at least one phosphate backbone modification.

190. The antisense nucleic acid molecule of claim 159, wherein said antisense nucleic acid molecule comprises at least one phosphate backbone modification.

191. A mammalian cell comprising the enzymatic nucleic acid molecule of any of claims 158, 160 or 161.

192. The mammalian cell of claim 191, wherein said mammalian cell is a human cell.

193. A method of reducing PTGDR activity in a cell, comprising contacting said cell with the enzymatic nucleic acid molecule of any of claims 158, 160 or 161, under conditions suitable for said reduction.

194. A method of reducing PTGDR activity in a cell, comprising contacting said cell with the antisense nucleic acid molecule of claim 159 under conditions suitable for said reduction.

195. A method of treatment of a patient having a condition associated with the level of PTGDR, comprising contacting cells of said patient with the enzymatic nucleic acid molecule of any of claims 158, 160 or 161, under conditions suitable for said treatment.

196. A method of treatment of a patient having a condition associated with the level of PTGDR, comprising contacting cells of said patient with the antisense nucleic acid molecule of claim 159, under conditions suitable for said treatment.

197. The method of claim 193 further comprising the use of one or more drug therapies under conditions suitable for said treatment.

198. The method of claim 194 further comprising the use of one or more drug therapies under conditions suitable for said treatment.

199. The method of claim 195 further comprising the use of one or more drug therapies under conditions suitable for said treatment.

200. The method of claim 196 further comprising the use of one or more drug therapies under conditions suitable for said treatment.

201. A method of cleaving a RNA molecule encoded by a PTGDR gene comprising contacting the enzymatic nucleic acid molecule of any of claims 158, 160 or 161 with said RNA molecule encoded by a PTGDR gene under conditions suitable for the cleavage.

202. The method of claim 201, wherein said cleavage is carried out in the presence of a divalent cation.

203. The method of claim 202, wherein said divalent cation is Mg²⁺.

204. The enzymatic nucleic acid molecule of any of claims 158, 160 or 161, wherein said enzymatic nucleic acid comprises a cap structure, wherein the cap structure is at the 5′-end, 3′-end, or both the 5′-end and the 3′-end.

205. The antisense nucleic acid molecule of claim 159, wherein said antisense nucleic acid comprises a cap structure, wherein the cap structure is at the 5′-end, 3′-end, or both the 5′-end and the 3′-end.

206. The enzymatic nucleic acid molecule of claim 204, wherein the cap structure at the 5′-end, 3′-end, or both the 5′-end and the 3′-end comprises a 3′,3′-linked or 5′,5′-linked deoxyabasic ribose derivative.

207. The antisense nucleic acid molecule of claim 205, wherein the cap structure at the 5′-end, 3′-end, or both the 5′-end and the 3′-end comprises a 3′,3′-linked or 5′,5′-linked deoxyabasic ribose derivative.

208. The method of claim 193, wherein said enzymatic nucleic acid molecule is in a Zinzyme configuration.

209. An expression vector comprising a nucleic acid molecule encoding at least one enzymatic nucleic acid molecule of claim 158 or claim 160 in a manner that allows expression of the nucleic acid molecule.

210. A mammalian cell comprising the expression vector of claim 209.

211. The mammalian cell of claim 210, wherein said mammalian cell is a human cell.

212. The expression vector of claim 209, wherein said enzymatic nucleic acid molecule is in a hammerhead configuration.

213. The expression vector of claim 209, wherein said expression vector further comprises a sequence for an antisense nucleic acid molecule complementary to a RNA molecule encoded by a PTGDR gene.

214. The expression vector of claim 209, wherein said expression vector comprises a nucleic acid sequence encoding two or more of said enzymatic nucleic acid molecules, which can be the same or different.

215. The expression vector of claim 214, wherein said expression vector further comprises a sequence encoding an antisense nucleic acid molecule complementary to a RNA molecule encoded by a PTGDR gene.

216. A method for treatment of an allergic condition comprising the step of administering to a patient the enzymatic nucleic acid molecule of any of claims 156-159 under conditions suitable for said treatment.

217. The method of claim 216, wherein said allergic condition is asthma, allergic rhinitis, or atopic dermatitis.

218. A method for treatment of an allergic condition comprising administering to a patient the antisense nucleic acid molecule of claim 159 under conditions suitable for said treatment.

219. The method of claim 218, wherein said allergic condition is asthma, allergic rhinitis, or atopic dermatitis.

220. The method of claim 216, wherein said enzymatic nucleic acid molecule is in a Zinzyme configuration.

221. The method of claim 216, wherein said method further comprises administering to said patient one or more other treatment therapies.

222. The method of claim 218, wherein said method further comprises administering to said patient one or more other treatment therapies.

223. The enzymatic nucleic acid molecule of any of claims 158, 160 or 161, wherein said enzymatic nucleic acid molecule comprises at least five ribose residues, at least ten 2′-O-methyl modifications, and a 3′-end modification.

224. The enzymatic nucleic acid molecule of claim 223, wherein said enzymatic nucleic acid molecule further comprises phosphorothioate linkages on at least three of the 5′ terminal nucleotides.

225. The nucleic acid molecule of claim 223, wherein said 3′-end modification is a 3′-3′ inverted abasic moiety.

226. The method of claim 197 wherein said other drug therapies are bronchodilators, anti-inflammatories, adenosine inhibitors, or adenosine A1 receptor inhibitors.

227. A pharmaceutical composition comprising an enzymatic nucleic acid molecule of any of claims 158, 160 or 161.

228. A pharmaceutical composition comprising an antisense nucleic acid molecule of claim 159.

229. A method of administering to a mammal the nucleic acid molecule of claim 157, comprising contacting said mammal with the nucleic acid molecule under conditions suitable for said administration.

230. The method of claim 229, wherein said mammal is a human.

231. The method of claim 229 wherein said administration is in the presence of a delivery reagent.

232. The method of claim 231, wherein said delivery reagent is a lipid.

233. The method of claim 232, wherein said lipid is a cationic lipid.

234. The method of claim 232, wherein said lipid is a phospholipid.

235. The method of claim 231, wherein said delivery reagent is a liposome.
